(19) United States
(12) Patent Application Publication
(10) Pub. No.: US 2010/0077502 A1
(43) Pub. Date: Mar. 25, 2010

(54) PLANTS HAVING ENHANCED YIELD-RELATED TRAITS AND A METHOD FOR MAKING THE SAME

(75) Inventors: Willem Broekaert, Dilboek (BE); Christophe Reuzeau, Tocan Saint Apre (FR); Ana Isabel Sanz Molinero, Gentbrugge (BE); Valerie Frankard, Waterloo (BE)

Correspondence Address: CONNOLLY BOVE LODGE & HUTZ, LLP, P O BOX 2207, WILMINGTON, DE, 19899, US

(73) Assignee: BASF Plant Science GmbH, Ludwigshafen (DE)

(21) Appl. No.: 12/519,787

(22) PCT Filed: Dec. 21, 2007
(86) PCT No.: PCT/EP2007/064510

§ 371 Date: Jul. 15, 2009

Related U.S. Application Data
(60) Provisional application No. 60/883,353, filed on Jan. 4, 2007.
(60) Provisional application No. 60/883,355, filed on Jan. 4, 2007.
(60) Provisional application No. 60/886,106, filed on Jan. 23, 2007.
(60) Provisional application No. 60/886,105, filed on Jan. 23, 2007.
(60) Provisional application No. 60/886,104, filed on Jan. 23, 2007.

(30) Foreign Application Priority Data
Dec. 21, 2006 (EP) 06126852.0
Dec. 21, 2006 (EP) 06126891.8
Dec. 21, 2006 (EP) 06126950.2
Dec. 22, 2006 (EP) 06127101.1
Dec. 22, 2006 (EP) 06127112.8

(51) Int. Cl. A01H 1/00

(52) U.S. Cl. 800/278

(57) ABSTRACT

The present invention relates generally to the field of molecular biology and concerns a method for enhancing various economically important yield-related traits in plants. More specifically, the present invention concerns a method for enhancing yield-related traits in plants by modulating expression in a plant of a nucleic acid encoding a Yield Enhancing Protein (YEP). The YEP is selected from a Vacuolar Processing Enzyme (VPE) or a CCA1-like polypeptide or a SAP-like polypeptide or a Seed Yield Promoting Factor 1 (SYPF1) polypeptide or a Ribulose-1,5-bisphosphate carboxylase/oxygenase (RuBisCO) activase (RCA) polypeptide. The present invention also concerns plants having modulated expression of a nucleic acid encoding such a YEP, which plants have enhanced yield-related traits relative to control plants. The invention also provides hitherto unknown YEP-encoding nucleic acids, and constructs comprising the same, useful in performing the methods of the invention.

[0001] The present invention relates generally to the field of molecular biology and concerns a method for enhancing various economically important yield-related traits in plants. More specifically, the present invention concerns a method for enhancing yield-related traits in plants by modulating expression in a plant of a nucleic acid encoding a Yield Enhancing Protein (YEP). The YEP is selected from a Vacuolar Processing Enzyme (VPE), a CCA1-like polypeptide, a SAP-like polypeptide, a Seed Yield Promoting Factor 1 (SYPF1) polypeptide and a Ribulose-1,5-bisphosphate carboxylase/oxygenase (RuBisCO) activase (RCA) polypeptide. The present invention also concerns plants having modulated expression of a nucleic acid encoding such a YEP, which plants have enhanced yield-related traits relative to control plants. The invention also provides hitherto unknown YEP-encoding nucleic acids, and constructs comprising the same, useful in performing the methods of the invention.

[0002] The ever-increasing world population and the dwindling supply of arable land available for agriculture fuels research towards increasing the efficiency of agriculture. Conventional means for crop and horticultural improvements utilise selective breeding techniques to identify plants having desirable characteristics. However, such selective breeding techniques have several drawbacks, namely that these techniques are typically labour intensive and result in plants that often contain heterogeneous genetic components that may not always result in the desirable trait being passed on from parent plants. Advances in molecular biology have allowed mankind to modify the germplasm of animals and plants. Genetic engineering of plants entails the isolation and manipulation of genetic material (typically in the form of DNA or RNA) and the subsequent introduction of that genetic material into a plant. Such technology has the capacity to deliver crops or plants having various improved economic, agronomic or horticultural traits.

[0003] A trait of particular economic interest is increased yield. Yield is normally defined as the measurable produce of economic value from a crop. This may be defined in terms of quantity and/or quality. Yield is directly dependent on several factors, for example, the number and size of the organs, plant architecture (for example, the number of branches), seed production, leaf senescence and more. Root development, nutrient uptake, stress tolerance and early vigour may also be important factors in determining yield. Optimizing the abovementioned factors may therefore contribute to increasing crop yield.

[0004] Seed yield is a particularly important trait, since the seeds of many plants are important for human and animal nutrition. Crops such as, corn, rice, wheat, canola and soybean account for over half the total human caloric intake, whether through direct consumption of the seeds themselves or through consumption of meat products raised on processed seeds. They are also a source of sugars, oils and many kinds of metabolites used in industrial processes. Seeds contain an embryo (the source of new shoots and roots) and an endosperm (the source of nutrients for embryo growth during germination and during early growth of seedlings). The development of a seed involves many genes, and requires the transfer of metabolites from the roots, leaves and stems into the growing seed. The endosperm, in particular, assimilates the metabolic precursors of carbohydrates, oils and proteins and synthesizes them into storage macromolecules to fill out the grain.

[0005] Plant biomass is yield for forage crops like alfalfa, silage corn and hay. Many proxies for yield have been used in grain crops. Chief amongst these are estimates of plant size. Plant size can be measured in many ways depending on species and developmental stage, but include total plant dry weight, above-ground dry weight, above-ground fresh weight, leaf area, stem volume, plant height, rosette diameter, leaf length, root length, root mass, tiller number and leaf number. Many species maintain a conservative ratio between the size of different parts of the plant at a given developmental stage. These allometric relationships are used to extrapolate from one of these measures of size to another (e.g. Tittonell et al 2005 Agric Ecosys & Environ 105: 213). Plant size at an early developmental stage will typically correlate with plant size later in development. A larger plant with a greater leaf area can typically absorb more light and carbon dioxide than a smaller plant and therefore will likely gain a greater weight during the same period (Fasoula & Tollenaar 2005 Maydica 50:39). This is in addition to the potential continuation of the micro-environmental or genetic advantage that the plant had to achieve the larger size initially. There is a strong genetic component to plant size and growth rate (e.g. ter Steege et al 2005 Plant Physiology 139:1078), and so for a range of diverse genotypes plant size under one environmental condition is likely to correlate with size under another (Hittalmani et al 2003 Theoretical Applied Genetics 107:679). In this way a standard environment is used as a proxy for the diverse and dynamic environments encountered at different locations and times by crops in the field.

[0006] Harvest index, the ratio of seed yield to aboveground dry weight, is relatively stable under many environmental conditions and so a robust correlation between plant size and grain yield can often be obtained (e.g. Rebetzke et al 2002 Crop Science 42:739). These processes are intrinsically linked because the majority of grain biomass is dependent on current or stored photosynthetic productivity by the leaves and stem of the plant (Gardener et al 1985 Physiology of Crop Plants. Iowa State University Press, pp 68-73). Therefore, selecting for plant size, even at early stages of development, has been used as an indicator for future potential yield (e.g. Tittonell et al 2005 Agric Ecosys & Environ 105: 213). When testing for the impact of genetic differences on stress tolerance, the ability to standardize soil properties, temperature, water and nutrient availability and light intensity is an intrinsic advantage of greenhouse or plant growth chamber environments compared to the field. However, artificial limitations on yield due to poor pollination due to the absence of wind or insects, or insufficient space for mature root or canopy growth, can restrict the use of these controlled environments for testing yield differences. Therefore, measurements of plant size in early development, under standardized conditions in a growth chamber or greenhouse, are standard practices to provide indication of potential genetic yield advantages.

[0007] A further trait of economic importance for many crops is early vigour. Improving early vigour is an important objective of modern rice breeding programs in both temperate and tropical rice cultivars. Long roots are important for proper soil anchorage in water-seeded rice. Where rice is sown directly into flooded fields, and where plants must emerge rapidly through water, longer shoots are associated with vigour. Where drill-seeding is practiced, longer mesocotyls and coleoptiles are important for good seedling emergence. Early vigour may also result from increased plant fitness due to, for example, the plants being better adapted to their environment (i.e. being more able to cope with various abiotic or biotic stress factors). Plants having early vigour also show better establishment of the crop (with the crop growing in a more uniform manner, i.e. with the majority of plants reaching the various stages of development at substantially the same time), and show better growth and often better yield.

[0008] The ability to engineer early vigour into plants would be of great importance in agriculture, as would the ability to increase plant seed yield, whether through seed number, seed biomass, seed development, seed filling, or any other seed-related trait. Aside form the many applications in agriculture (including in the production of ornamental plants, arboriculture, horticulture and forestry), enhancing yield-related traits would also have many non-agricultural uses, such as in the biotechnological production of substances such as pharmaceuticals, antibodies or vaccines. Increasing yield may also find use in the production of algae for use in bioreactors (for the biotechnological production of substances such as pharmaceuticals, antibodies or vaccines, or for the bioconversion of organic waste) and other such areas.

[0009] Surprisingly, it has now been found that modulating expression in a plant of a nucleic acid encoding a Yield Enhancing Polypeptide (YEP) selected from a Vacuolar Processing Enzyme (VPE), a CCA1-like polypeptide, a SAP-like polypeptide, a Seed Yield Promoting Factor 1 (SYPF1) polypeptide and a Ribulose-1,5-bisphosphate carboxylase/oxygenase (RuBisCO) activase (RCA) polypeptide gives plants having enhanced yield-related traits relative to control plants.

### BACKGROUND

### I. Vacuolar Processing Enzymes

### VPEs

[0010] Vacuolar Processing Enzymes (VPEs) are cysteine proteases that cleave a peptide bond at the C-terminal side of asparagine and aspartic acid. VPE was originally discovered as a novel cysteine proteinase responsible for the maturation of seed storage Proteins. Arabidopsis has four VPE genes (alpha VPE, beta VPE, gamma VPE and delta VPE). Hara-Nishimura et al., Current Opinion in Plant Biology 2005, 8:404-408.

[0011] In higher plants, proprotein precursors of various vacuolar proteins are converted post-translationally to their respective mature forms by the action of VPEs. The molecular structure of the enzyme was originally reported for castor bean VPE. VPE homologues have been found in plants (soybean, Jack bean, Arabidopsis, vetch and citrus) and animals (Schistosoma mansoni, human and mouse). A VPE precursor is composed of a signal peptide, an N-terminal propeptide, the mature VPE domain and a C-terminal propeptide. A yeast (Saccharomyces cerevisiae) transformant expressing a VPE precursor of castor bean accumulated the mature form in the vacuoles. The mature protein had a vacuolar processing activity; in contrast, the precursor had no activity. Analysis of mutants having no activity suggested that the conversion of the proprotein precursor of VPE into an active form might be mediated self-catalytically. (Hiraiwa et al. FEBS Letters 447, 1999, pp. 213-216).

[0012] Programmed cell death (PCD) occurs in animals and plants under various stresses and during development. VPE was identified as an executioner of plant PCD. VPE exhibits enzymatic properties similar to that of a caspase, which is a cysteine protease that mediates the PCD pathway in animals, although there is limited sequence identity between the two enzymes. VPE was reported to have caspase-1 activity (Hatsugai et al., SCIENCE VOL 305 6 AUGUST 2004). VPE and caspase-1 share several structural properties: the catalytic dyads and three amino acids forming the substrate pockets (Asp pocket) are conserved between VPE and caspase-1. In contrast to such similarities, VPE is localized in the vacuoles, while caspases are localized in the cytosol. VPE functions as a key molecule of plant PCD through disrupting the vacuole in pathogenesis and development. Hatsugai et al., Apoptosis 2006; 11: 905-911. VPE gamma (VPEg), was reported to be induced during senescence, a form of PCD (see Rojo et al., 2004, Current Biology, Vol. 14, pp 1897-1906).

### II. CCA1

[0013] MYB proteins are a superfamily of transcription factors that play regulatory roles in developmental processes and defence responses in plants. Expression analysis revealed that the expression for most of the Arabidopsis MYB genes were responsive to one or multiple types of hormone and stress treatments (Yanhui et al., Plant Mol. Biol 60, 107-124, 2006). A phylogenetic comparison of the members of this superfamily in Arabidopsis and rice suggested that the Arabidopsis MYB superfamily underwent a rapid expansion after its divergence from monocots but before its divergence from other dicots (Yanhui et al., 2006). MYB proteins typically comprise a structurally conserved DNA-binding domain, the MYB domain. They are involved in the cell cycle, regulation of meristem formation, control of cellular differentiation and in the regulation of secondary metabolism. MYB domain transcription factors constitute one of the largest family of transcription factors in plants (at least 130 in Arabidopsis thaliana), but with little sequence conservation outside of the MYB domain. They have therefore been clustered into subgroups based on conserved motifs identified outside of the MYB coding region (Jiang et al. (2004) Genome Biology 5:R46). Different categories of MYB proteins can be identified depending on the number of imperfect repeats of the MYB domain they contain, grouped into 3 families: R2R3-MYB family, R1R2R3-MYB family and the MYB-related family. The R2R3-MYB family comprises the largest number of MYB proteins and is divided into five subfamilies (Yanhui et al. 2006): CCA1-like, CPC-like, TBP-like, 1-box-binding-like and R-R-type MYB proteins. Of these, the CCA1-like subfamily is the largest, and members of this subfamily contain the conserved motif SHAQK or MYADN in the MYB repeat.

[0014] The circadian clock controls various physiological and molecular processes in higher organisms. In plants, these processes include leaf movement, stomata opening, and expression of a large number of genes. In Arabidopsis thaliana, a number of clock-associated protein components have been identified. Among them, CCA1 (CIRCADIAN CLOCK-ASSOCIATED 1)/LHY (LATE ELONGATED HYPOCOTYL) and TOC1 (TIMING OF CAB EXPRESSION 1) are believed to be the essential components of the central oscillator. CCA1 and LHY are homologous and partially redundant Myb-related DNA-binding proteins, whereas TOC1 is a member of a small family of proteins, designated as PSEUDO-RESPONSE REGULATOR. It is also believed that these two different types of clock components form an autoregulatory positive/negative feedback loop at the levels of transcription/translation that generates intrinsic rhythms (Nakamichi et al., Plant Cell Physiol. 46, 686-689, 2005). It was reported that constitutive expression of the CCA1 (CIRCADIAN CLOCK ASSOCIATED 1) gene in Arabidopsis plants (CCA1-ox) results in loss of circadian rhythmicity (Green et al., Plant Physiol. 129, 576-584, 2002). These CCA1-ox plants retain the ability to respond to diurnal changes in light. Thus, transcript levels of several circadian-regulated genes, as well as CCA1 itself and the closely related LHY, oscillate robustly if CCA1-ox plants are grown under diurnal conditions. However, in contrast with wild-type plants in which transcript levels change in anticipation of the dark/light transitions, the CCA1-ox plants have lost the ability to anticipate this daily change in their environment. CCA1-ox plants flowered later, especially under long-day conditions, and were less viable under very short-day conditions than their wild-type counterparts. In addition, it was demonstrated that two other circadian rhythm mutants, LHY-ox and elf3, have low-viability phenotypes.

[0015] WO2003013228 and US2004019927 describe that CCA1 overexpressing plants were late bolting, showed increased biomass (increased leaf number and size), and were darker green in vegetative and reproductive tissues. It was suggested that CCA1 could be useful in increasing chlorophyll content allowing more growth and productivity in conditions of low light. Furthermore, it was stated that use of CCA1 to prevent flowering could help maximize vegetative yields and prevent escape of genetically modified organism (GMO) pollen (US2004045049). So far, there are no reports showing that increased CCA1 expression results increased seed yield, on the contrary, CCA1-overexpressors flowered later, especially under long-day conditions, and were less viable under very short-day conditions than their wild-type counterparts (Green et al., 2002).

### III. SAP

[0016] The SAP domain (named after SAF-NB, Acinus and PIAS) is a DNA binding domain that forms a helix-extended-helix structure. Proteins with a SAP domain (also named SAF box) have been identified in yeast, mammals and plants. The SAP domain is composed of 35 amino acids residues and comprises two amphipathic helices separated by a glycine-containing region. Some positions in this domain are enriched with positively charged amino acids (R, K) which are thought to contact the DNA backbone. The SAP domain reportedly forms a helix-extended-helix (HEH) structure and that some prokaryotic proteins, such as transcription terminator RHO protein, are also predicted to contain SAP domains. Chen et al., 2003 (Plant Molecular Biology 52: 579-590) report that SAP domain-containing proteins have been implicated in various functions related to their interactions with DNA and/or RNA. SAP proteins have been implicated in nuclear architecture and/or RNA metabolism. For example, human scaffold attachment factor A (SAF-A) is an abundant component of the nuclear scaffold (nuclear matrix) and is also present in heterogeneous nuclear ribonucleoprotein complexes, which have been implicated in nuclear organization and RNA processing. Acinus is a caspase-3-activated protein required for apoptotic chromatin condensation. Members of the PIAS proteins family combining SAP domains and MIZ Zn-finger motifs are the protein inhibitors of activated STATs (signal transducer and activator of transcription). Yeast Tho1p protein, another SAP-containing protein, plays a role in regulating elongation of transcription by RNA polymerase II. Chen et al., 2003, describe the cloning and characterization of a rice gene, OsBP-73, encoding a 375 amino acid protein with a SAP-like domain. The authors report that Northern blot analysis demonstrated that OsBP-73 is weakly expressed in root, leaf and immature seed. They also examined OsBP-73 gene expression by histochemical studies of transgenic rice plants carrying an OsBP-73 5_/GUS reporter gene. The reporter gene was found to be mainly expressed in the tissues with high cell division activities, such as root tip, stem node, panicle and immature seed. They further report that genetic interference of OsBP-73 gene expression by double-stranded RNA inhibits the whole plant growth but does not affect the passage from the juvenile to adult phase. They suggest that OsBP-73 may play an important role in the regulation of cell proliferation.

### IV. SYPF1

[0017] SYPF1 is a novel transcription factor useful in enhancing yield-related traits in plants.

[0018] Transcription factors are usually defined as proteins that show sequence-specific DNA binding and that are capable of activating and/or repressing transcription. The Arabidopsis genome codes for at least 1533 transcriptional regulators, which account for ˜5.9% of its estimated total number of genes. About 45% of these transcription factors are reported to be from families specific to plants (Riechmann et al., 2000 (Science Vol. 290, 2105-2109)).

[0019] SYPF1, according to the PRODOM database, was found to share some similarity to tumor related At4g18650; TGA1 bzip activator coil. Miao et al., 1994 (Plant Mol Biol. April 25(1): 1-11) report that TGA1a is a well-characterized transcription factor that may mediate the root-specific and auxin-responsive expression of some plant genes.

### V. Ribulose-1,5-bisphosphate Carboxylase/Oxygenase (RuBisCO) Activase (RCA) Polypeptide

[0020] Ribulose-1,5-bisphosphate carboxylase/oxygenase (RuBisCo, EC 4.1.1.39 [EC]) is the most abundant and one of the most important enzymes on earth. It catalyses the first and rate-limiting step in photosynthetic carbon fixation, the irreversible carboxylation of ribulose-1,5-bisphosphate and CO2 to form two 3-phosphoglyceric acid molecules. However, the rate of the reaction is extremely slow, and RuBisCo must be activated and carbamylated to become catalytically competent. Activation is achieved by RuBisCo activase (RCA), which can remove inhibitors from RuBisCo's catalytic sites, alter the conformation, and activate RuBisCo in vivo in an ATP-dependent manner (Andrews et al., 1995).

[0021] RCA is a nuclear-encoded chloroplast protein that is a member of the AAA+ family (ATPases associated with diverse cellular activities) based on sequence and structural homologies, whose members participate in macromolecular complexes that perform diverse chaperone-like functions. Consistent with the ATPase activity of RCA, a P loop (or Walker A; Walker et al., (1982) EMBO J. 1982; 1:945-951) triphosphate-binding loop consensus sequence GXXXGK(S/T), for nucleotide binding, is identified within the RCA polypeptide sequence. Several other critical amino acid residues necessary for RCA interaction with and activation of RuBisCo have also been identified (for review: Portis (2003) Photosynthesis Research 75: 11-27).

[0022] RCA consists in most plants of two isoforms, of 45-46 kDa (or alpha form) and of 41-43 kDa (or beta form), arising from a single gene via alternative splicing (for review, see Portis (2003) Photosynthesis Research 75: 11-27). The two forms differ only at the carboxy terminus, the longer form comprising two cysteine residues involved in light-dependent redox regulation (mediated by thioredoxin-f). In contrast with most plants, a single polypeptide (without the carboxy terminal extension) has been found in the green alga Chlamydomonas reinhardtii, which also comprises a chloroplast transit peptide at the amino terminus of the polypeptide (Roesler & Ogren (1990) Plant Physiol 94(4):1837-1841).

[0023] Mutant Arabidopsis plants lacking RCA activity (named rca-; Somerville et al. (1982) Plant Physiol 70: 381-387) or transgenic plants having a very low level of RCA activity cannot survive at atmospheric CO₂ levels (Flayeria bidentis; von Caemmerer et al. (2005) Plant Physiol 137(2):747-55), and those expressing reduced levels exhibit reduced rates of photosynthesis and growth (in Arabidopsis, Eckhardt et al. (1997) Plant Physiol 113: 575-586; in tobacco, Mate et al. (1996) Planta 198: 604-613). However large reductions in RCA activity levels are required before steady-state photosynthesis is noticeably affected, at normal temperatures (for example, Arabidopsis, rice (Jin et al. (2006) Ann Bot (Lond) 97(5):739-44), tobacco (He et al. (1997) Plant Physiol 115(4):1569-80; Hammond et al. (1998) Plant J 14: 101-110).

[0024] Arabidopsis mutants lacking RCA (rca-) were transformed (complemented) with the alpha RCA isoform, a mutated alpha RCA isoform (the two Cys residues involved in redox regulation are mutated in Ala residues), the beta RCA isoform, or both RCA isoforms restored the ability of the plants to grow under normal levels of CO2 (Zhang et al. (2002) PNAS USA 99(5): 3330-3334). Plants expressing only the beta RCA isoform (and thus not light-dependent redox-regulated) or expressing only the mutated alpha RCA isoform (redox insensitive) were incapable of down-regulating RuBisCo under limiting light conditions.

[0025] Patent application US2006/0272044 relates to methods (by gene shuffling) for obtaining isolated polynucleotides sequences encoding RCA polypeptides having enhanced activity.

[0026] Surprisingly, it has now been found that modulating expression in a plant of a nucleic acid encoding a YEP selected from a Vacuolar Processing Enzyme (VPE), a CCA1-like polypeptide, a SAP-like polypeptide, a Seed Yield Promoting Factor 1 (SYPF1) polypeptide and a Ribulose-1,5-bisphosphate carboxylase/oxygenase (RuBisCO) activase (RCA) polypeptide gives plants having enhanced yield-related traits relative to control plants.

### DEFINITIONS

### Polypeptide(s)/Protein(s)

[0027] The terms “polypeptide” and “protein” are used interchangeably herein and refer to amino acids in a polymeric form of any length.

### Polynucleotide(s)/Nucleic Acid(s)/Nucleic Acid Sequence(s)/Nucleotide Sequence(s)

[0028] The terms “polynucleotide(s)”, “nucleic acid sequence(s)”, “nucleotide sequence(s)” are used interchangeably herein and refer to nucleotides, either ribonucleotides or deoxyribonucleotides or a combination of both, in a polymeric form of any length.

### Control Plant(s)

[0029] The choice of suitable control plants is a routine part of an experimental setup and may include corresponding wild type plants or corresponding plants without the gene of interest. The control plant is typically of the same plant species or even of the same variety as the plant to be assessed. The control plant may also be a nullizygote of the plant to be assessed. A “control plant” as used herein refers not only to whole plants, but also to plant parts, including seeds and seed parts.

### Homologue(s)

[0030] “Homologues” of a protein encompass peptides, oligopeptides, polypeptides, proteins and enzymes having amino acid substitutions, deletions and/or insertions relative to the unmodified protein in question and having similar biological and functional activity as the unmodified protein from which they are derived.

[0031] A deletion refers to removal of one or more amino acids from a protein.

[0032] An insertion refers to one or more amino acid residues being introduced into a predetermined site in a protein. Insertions may comprise N-terminal and/or C-terminal fusions as well as intra-sequence insertions of single or multiple amino acids. Generally, insertions within the amino acid sequence will be smaller than N- or C-terminal fusions, of the order of about 1 to 10 residues. Examples of N- or C-terminal fusion proteins or peptides include the binding domain or activation domain of a transcriptional activator as used in the yeast two-hybrid system, phage coat proteins, (histidine)-6-tag, glutathione S-transferase-tag, protein A, maltose-binding protein, dihydrofolate reductase, Tag•100 epitope, c-myc epitope, FLAG®-epitope, lacZ, CMP (calmodulin-binding peptide), HA epitope, protein C epitope and VSV epitope.

[0033] A substitution refers to replacement of amino acids of the protein with other amino acids having similar properties (such as similar hydrophobicity, hydrophilicity, antigenicity, propensity to form or break α-helical structures or β-sheet structures). Amino acid substitutions are typically of single residues, but may be clustered depending upon functional constraints placed upon the polypeptide; insertions will usually be of the order of about 1 to 10 amino acid residues. The amino acid substitutions are preferably conservative amino acid substitutions. Conservative substitution tables are well known in the art (see for example Creighton (1984) Proteins. W.H. Freeman and Company and Table 1 below).

TABLE 1
Examples of conserved amino acid substitutions

| | Conservative |
|---|---|
| Residue | Substitutions |
| Ala | Ser |
| Arg | Lys |
| Asn | Gln; His |
| Asp | Glu |
| Gln | Asn |
| Cys | Ser |
| Glu | Asp |
| Gly | Pro |
| His | Asn; Gln |
| Ile | Leu, Val |
| Leu | Ile; Val |
| Lys | Arg; Gln |
| Met | Leu; Ile |
| Phe | Met; Leu; Tyr |
| Ser | Thr; Gly |
| Thr | Ser; Val |
| Trp | Tyr |
| Tyr | Trp; Phe |
| Val | Ile; Leu |

[0034] Amino acid substitutions, deletions and/or insertions may readily be made using peptide synthetic techniques well known in the art, such as solid phase peptide synthesis and the like, or by recombinant DNA manipulation. Methods for the manipulation of DNA sequences to produce substitution, insertion or deletion variants of a protein are well known in the art. For example, techniques for making substitution mutations at predetermined sites in DNA are well known to those skilled in the art and include M13 mutagenesis, T7-Gen in vitro mutagenesis (USB, Cleveland, Ohio), QuickChange Site Directed mutagenesis (Stratagene, San Diego, Calif.), PCR-mediated site-directed mutagenesis or other site-directed mutagenesis protocols.

### Derivatives

[0035] “Derivatives” include peptides, oligopeptides, polypeptides which may, compared to the amino acid sequence of the naturally-occurring form of the protein, such as the protein of interest, comprise substitutions of amino acids with non-naturally occurring amino acid residues, or additions of non-naturally occurring amino acid residues. “Derivatives” of a protein also encompass peptides, oligopeptides, polypeptides which comprise naturally occurring altered (glycosylated, acylated, prenylated, phosphorylated, myristoylated, sulphated etc.) or non-naturally altered amino acid residues compared to the amino acid sequence of a naturally-occurring form of the polypeptide. A derivative may also comprise one or more non-amino acid substituents or additions compared to the amino acid sequence from which it is derived, for example a reporter molecule or other ligand, covalently or non-covalently bound to the amino acid sequence, such as a reporter molecule which is bound to facilitate its detection, and non-naturally occurring amino acid residues relative to the amino acid sequence of a naturally-occurring protein. Furthermore, “derivatives” also include fusions of the naturally-occurring form of the protein with tagging peptides such as FLAG, HIS6 or thioredoxin (for a review of tagging peptides, see Terpe, Appl. Microbiol. Biotechnol. 60, 523-533, 2003).

### Orthologue(s)/Paralogue(s)

[0036] Orthologues and paralogues encompass evolutionary concepts used to describe the ancestral relationships of genes. Paralogues are genes within the same species that have originated through duplication of an ancestral gene; orthologues are genes from different organisms that have originated through speciation, and are also derived from a common ancestral gene.

### Domain

[0037] The term “domain” refers to a set of amino acids conserved at specific positions along an alignment of sequences of evolutionarily related proteins. While amino acids at other positions can vary between homologues, amino acids that are highly conserved at specific positions indicate amino acids that are likely essential in the structure, stability or activity of a protein. Identified by their high degree of conservation in aligned sequences of a family of protein homologues, they can be used as identifiers to determine if any polypeptide in question belongs to a previously identified polypeptide family.

### Motif/Consensus Sequence/Signature

[0038] The term “motif” or “consensus sequence” or “signature” refers to a short conserved region in the sequence of evolutionarily related proteins. Motifs are frequently highly conserved parts of domains, but may also include only part of the domain, or be located outside of conserved domain (if all of the amino acids of the motif fall outside of a defined domain).

### Hybridisation

[0039] The term “hybridisation” as defined herein is a process wherein substantially homologous complementary nucleotide sequences anneal to each other. The hybridisation process can occur entirely in solution, i.e. both complementary nucleic acids are in solution. The hybridisation process can also occur with one of the complementary nucleic acids immobilised to a matrix such as magnetic beads, Sepharose beads or any other resin. The hybridisation process can furthermore occur with one of the complementary nucleic acids immobilised to a solid support such as a nitro-cellulose or nylon membrane or immobilised by e.g. photolithography to, for example, a siliceous glass support (the latter known as nucleic acid arrays or microarrays or as nucleic acid chips). In order to allow hybridisation to occur, the nucleic acid molecules are generally thermally or chemically denatured to melt a double strand into two single strands and/or to remove hairpins or other secondary structures from single stranded nucleic acids.

[0040] The term “stringency” refers to the conditions under which a hybridisation takes place. The stringency of hybridisation is influenced by conditions such as temperature, salt concentration, ionic strength and hybridisation buffer composition. Generally, low stringency conditions are selected to be about 30° C. lower than the thermal melting point (Tm) for the specific sequence at a defined ionic strength and pH. Medium stringency conditions are when the temperature is 20° C. below Tm, and high stringency conditions are when the temperature is 10° C. below Tm. High stringency hybridisation conditions are typically used for isolating hybridising sequences that have high sequence similarity to the target nucleic acid sequence. However, nucleic acids may deviate in sequence and still encode a substantially identical polypeptide, due to the degeneracy of the genetic code. Therefore medium stringency hybridisation conditions may sometimes be needed to identify such nucleic acid molecules.

[0041] The Tm is the temperature under defined ionic strength and pH, at which 50% of the target sequence hybridises to a perfectly matched probe. The Tm is dependent upon the solution conditions and the base composition and length of the probe. For example, longer sequences hybridise specifically at higher temperatures. The maximum rate of hybridisation is obtained from about 16° C. up to 32° C. below Tm. The presence of monovalent cations in the hybridisation solution reduce the electrostatic repulsion between the two nucleic acid strands thereby promoting hybrid formation; this effect is visible for sodium concentrations of up to 0.4M (for higher concentrations, this effect may be ignored). Formamide reduces the melting temperature of DNA-DNA and DNA-RNA duplexes with 0.6 to 0.7° C. for each percent formamide, and addition of 50% formamide allows hybridisation to be performed at 30 to 45° C., though the rate of hybridisation will be lowered. Base pair mismatches reduce the hybridisation rate and the thermal stability of the duplexes. On average and for large probes, the Tm decreases about 1° C. per % base mismatch. The Tm may be calculated using the following equations, depending on the types of hybrids:

1) DNA-DNA hybrids (Meinkoth and Wahl, Anal. Biochem., 138: 267-284, 1984):

Tm=81.5° C.+16.6x log 10[Na+]^{a}+0.41x %[G/C^{b}]−500×[L^{c}]−1−0.61x % formamide

2) DNA-RNA or RNA-RNA hybrids:

Tm=79.8+18.5(log 10[Na+]^{a})+0.58(% G/C^{b})+11.8(% G/C^{b})2−820/L^{c}

3) oligo-DNA or oligo-RNA^{d} hybrids:

For <20 nucleotides: Tm=2(ln)

For 20-35 nucleotides: Tm=22+1.46(ln)
[0042] ^{a} or for other monovalent cation, but only accurate in the 0.01-0.4 M range.
[0043] ^{b} only accurate for % GC in the 30% to 75% range.
[0044] ^{c} L=length of duplex in base pairs.
[0045] ^{d} Oligo, oligonucleotide; In, effective length of primer=2×(no. of G/C)+(no. of A/T).

[0046] Non-specific binding may be controlled using any one of a number of known techniques such as, for example, blocking the membrane with protein containing solutions, additions of heterologous RNA, DNA, and SDS to the hybridisation buffer, and treatment with Rnase. For non-homologous probes, a series of hybridizations may be performed by varying one of (i) progressively lowering the annealing temperature (for example from 68° C. to 42° C.) or (ii) progressively lowering the formamide concentration (for example from 50% to 0%). The skilled artisan is aware of various parameters which may be altered during hybridisation and which will either maintain or change the stringency conditions.

[0047] Besides the hybridisation conditions, specificity of hybridisation typically also depends on the function of post-hybridisation washes. To remove background resulting from non-specific hybridisation, samples are washed with dilute salt solutions. Critical factors of such washes include the ionic strength and temperature of the final wash solution: the lower the salt concentration and the higher the wash temperature, the higher the stringency of the wash. Wash conditions are typically performed at or below hybridisation stringency. A positive hybridisation gives a signal that is at least twice of that of the background. Generally, suitable stringent conditions for nucleic acid hybridisation assays or gene amplification detection procedures are as set forth above. More or less stringent conditions may also be selected. The skilled artisan is aware of various parameters which may be altered during washing and which will either maintain or change the stringency conditions.

[0048] For example, typical high stringency hybridisation conditions for DNA hybrids longer than 50 nucleotides encompass hybridisation at 65° C. in 1×SSC or at 42° C. in 1×SSC and 50% formamide, followed by washing at 65° C. in 0.3×SSC. Examples of medium stringency hybridisation conditions for DNA hybrids longer than 50 nucleotides encompass hybridisation at 50° C. in 4×SSC or at 40° C. in 6×SSC and 50% formamide, followed by washing at 50° C. in 2×SSC. The length of the hybrid is the anticipated length for the hybridising nucleic acid. When nucleic acids of known sequence are hybridised, the hybrid length may be determined by aligning the sequences and identifying the conserved regions described herein. 1×SSC is 0.15M NaCl and 15 mM sodium citrate; the hybridisation solution and wash solutions may additionally include 5×Denhardt's reagent, 0.5-1.0% SDS, 100 μg/ml denatured, fragmented salmon sperm DNA, 0.5% sodium pyrophosphate.

[0049] For the purposes of defining the level of stringency, reference can be made to Sambrook et al. (2001) Molecular Cloning: a laboratory manual, 3rd Edition Cold Spring Harbor Laboratory Press, CSH, New York or to Current Protocols in Molecular Biology, John Wiley & Sons, N.Y. (1989 and yearly updates).

### Splice Variant

[0050] The term “splice variant” as used herein encompasses variants of a nucleic acid sequence in which selected introns and/or exons have been excised, replaced, displaced or added, or in which introns have been shortened or lengthened. Such variants will be ones in which the biological activity of the protein is substantially retained; this may be achieved by selectively retaining functional segments of the protein. Such splice variants may be found in nature or may be manmade. Methods for predicting and isolating such splice variants are well known in the art (see for example Foissac and Schiex, BMC Bioinformatics. 2005; 6: 25).

### Allelic Variant

[0051] Alleles or allelic variants are alternative forms of a given gene, located at the same chromosomal position. Allelic variants encompass Single Nucleotide Polymorphisms (SNPs), as well as Small Insertion/Deletion Polymorphisms (INDELs). The size of INDELs is usually less than 100 bp. SNPs and INDELs form the largest set of sequence variants in naturally occurring polymorphic strains of most organisms.

### Gene Shuffling/Directed Evolution

[0052] Gene shuffling or directed evolution consists of iterations of DNA shuffling followed by appropriate screening and/or selection to generate variants of nucleic acids or portions thereof encoding proteins having a modified biological activity (Castle et al., (2004) Science 304(5674): 1151-4; U.S. Pat. Nos. 5,811,238 and 6,395,547).

### Regulatory Element/Control Sequence/Promoter

[0053] The terms “regulatory element”, “control sequence” and “promoter” are all used interchangeably herein and are to be taken in a broad context to refer to regulatory nucleic acid sequences capable of effecting expression of the sequences to which they are ligated. The term “promoter” typically refers to a nucleic acid control sequence located upstream from the transcriptional start of a gene and which is involved in recognising and binding of RNA polymerase and other proteins, thereby directing transcription of an operably linked nucleic acid. Encompassed by the aforementioned terms are transcriptional regulatory sequences derived from a classical eukaryotic genomic gene (including the TATA box which is required for accurate transcription initiation, with or without a CCAAT box sequence) and additional regulatory elements (i.e. upstream activating sequences, enhancers and silencers) which alter gene expression in response to developmental and/or external stimuli, or in a tissue-specific manner. Also included within the term is a transcriptional regulatory sequence of a classical prokaryotic gene, in which case it may include a −35 box sequence and/or −10 box transcriptional regulatory sequences. The term “regulatory element” also encompasses a synthetic fusion molecule or derivative that confers, activates or enhances expression of a nucleic acid molecule in a cell, tissue or organ.

[0054] A “plant promoter” comprises regulatory elements, which mediate the expression of a coding sequence segment in plant cells. Accordingly, a plant promoter need not be of plant origin, but may originate from viruses or micro-organisms, for example from viruses which attack plant cells. The “plant promoter” can also originate from a plant cell, e.g. from the plant which is transformed with the nucleic acid sequence to be expressed in the inventive process and described herein. This also applies to other “plant” regulatory signals, such as “plant” terminators. The promoters upstream of the nucleotide sequences useful in the methods of the present invention can be modified by one or more nucleotide substitution(s), insertion(s) and/or deletion(s) without interfering with the functionality or activity of either the promoters, the open reading frame (ORF) or the 3′-regulatory region such as terminators or other 3′ regulatory regions which are located away from the ORF. It is furthermore possible that the activity of the promoters is increased by modification of their sequence, or that they are replaced completely by more active promoters, even promoters from heterologous organisms. For expression in plants, the nucleic acid molecule must, as described above, be linked operably to or comprise a suitable promoter which expresses the gene at the right point in time and with the required spatial expression pattern.

### Operably Linked

[0055] The term “operably linked” as used herein refers to a functional linkage between the promoter sequence and the gene of interest, such that the promoter sequence is able to initiate transcription of the gene of interest.

### Developmentally-Regulated Promoter

[0056] A developmentally-regulated promoter is active during certain developmental stages or in parts of the plant that undergo developmental changes.

### Inducible Promoter

[0057] An inducible promoter has induced or increased transcription initiation in response to a chemical (for a review see Gatz 1997, Annu. Rev. Plant Physiol. Plant Mol. Biol., 48:89-108), environmental or physical stimulus, or may be “stress-inducible”, i.e. activated when a plant is exposed to various stress conditions, or a “pathogen-inducible” i.e. activated when a plant is exposed to exposure to various pathogens.

### Organ-Specific/Tissue-Specific Promoter

[0058] An organ-specific or tissue-specific promoter is one that is capable of preferentially initiating transcription in certain organs or tissues, such as the leaves, roots, seed tissue etc. Promoters able to initiate transcription in certain cells only are referred to herein as “cell-specific”.

### Organ-Specific/Tissue-Specific Promoter

[0059] An organ-specific or tissue-specific promoter is one that is capable of preferentially initiating transcription in certain organs or tissues, such as the leaves, roots, seed tissue etc. For example, a “root-specific promoter” is a promoter that is transcriptionally active predominantly in plant roots, substantially to the exclusion of any other parts of a plant, whilst still allowing for any leaky expression in these other plant parts. Promoters able to initiate transcription in certain cells only are referred to herein as “cell-specific”.

[0060] Examples of root-specific promoters are listed in the table below:

### Examples of Root-Specific Promoters

| Gene Source | Reference |
|---|---|
| RCc3 | Plant Mol Biol. 1995 Jan; 27(2): 237-48 |
| Arabidopsis PHT1 | Kovama et al., 2005; Mudge et al. |
| | (2002, Plant J. 31: 341) |
| Medicago phosphate | Xiao et al., 2006 |
| transporter | |
| Arabidopsis Pyk10 | Nitz et al. (2001) Plant Sci 161(2): 337-346 |
| root-expressible genes | Tingey et al., EMBO J. 6: 1, 1987. |
| tobacco auxin- | Van der Zaal et al., Plant Mol. Biol. 16, |
| inducible gene | 983, 1991. |
| β-tubulin | Oppenheimer, et al., Gene 63: 87, 1988. |
| tobacco root-specific | Conkling, et al., Plant Physiol. 93: 1203, 1990. |
| genes | |
| B. napus G1-3b gene | U.S. Pat. No. 5,401,836 |
| SbPRP1 | Suzuki et al., Plant Mol. Biol. 21: 109-119, 1993. |
| LRX1 | Baumberger et al. 2001, Genes & Dev. 15: 1128 |
| BTG-26 Brassica | US 20050044585 |
| napus | |
| LeAMT1 (tomato) | Lauter et al. (1996, PNAS 3: 8139) |
| The LeNRT1-1 | Lauter et al. (1996, PNAS 3: 8139) |
| (tomato) | |
| class I patatin gene | Liu et al., Plant Mol. Biol. 153: 386-395, 1991. |
| (potato) | |
| KDC1 (Daucus | Downey et al. (2000, J. Biol. Chem. 275: 39420) |
| carota) | |
| TobRB7 gene | W Song (1997) PhD Thesis, North Carolina State |
| | University, Raleigh, NC USA |
| OsRAB5a (rice) | Wang et al. 2002, Plant Sci. 163: 273 |
| ALF5 (Arabidopsis) | Diener et al. (2001, Plant Cell 13: 1625) |
| NRT2; 1Np | Quesada et al. (1997, Plant Mol. Biol. 34: 265) |
| (N. plumbaginifolia) | |

TABLE 2
Examples of seed-specific promoters

| Gene source | Reference |
|---|---|
| seed-specific genes | Simon et al., Plant Mol. Biol. 5: 191, 1985; |
| | Scofield et al., J. Biol. Chem. 262: 12202, 1987.; |
| | Baszczynski et al., Plant Mol. Biol. 14: 633, 1990. |
| Brazil Nut albumin | Pearson et al., Plant Mol. Biol. 18: 235-245, 1992. |
| Legumin | Ellis et al., Plant Mol. Biol. 10: 203-214, 1988. |
| glutelin (rice) | Takaiwa et al., Mol. Gen. Genet. 208: 15-22, 1986; |
| | Takaiwa et al., FEBS Letts. 221: 43-47, 1987. |
| Zein | Matzke et al Plant Mol Biol, 14(3): 323-32 1990 |
| napA | Stalberg et al, Planta 199: 515-519, 1996. |
| wheat LMW and HMW glutenin-1 | Mol Gen Genet 216: 81-90, 1989; NAR 17: 461-2, 1989 |
| wheat SPA | Albani et al, Plant Cell, 9: 171-184, 1997 |
| wheat α, β, γ-gliadins | EMBO J. 3: 1409-15, 1984 |
| barley ltr1 promoter | Diaz et al. (1995) Mol Gen Genet 248(5): 592-8 |
| barley B1, C, D, hordein | Theor Appl Gen 98: 1253-62, 1999; Plant J 4: 343-55, |
| | 1993; Mol Gen Genet 250: 750-60, 1996 |
| barley DOF | Mena et al, The Plant Journal, 116(1): 53-62, 1998 |
| blz2 | EP99106056.7 |
| Synthetic promoter | Vicente-Carbajosa et al., Plant J. 13: 629-640, 1998. |
| rice prolamin NRP33 | Wu et al, Plant Cell Physiology 39(8) 885-889, 1998 |
| rice a-globulin Glb-1 | Wu et al, Plant Cell Physiology 39(8) 885-889, 1998 |
| rice OSH1 | Sato et al, Proc. Natl. Acad. Sci. USA, 93: 8117-22, 1996 |
| rice α-globulin REB/OHP-1 | Nakase et al. Plant Mol. Biol. 33: 513-522, 1997 |
| rice ADP-glucose | Trans Res 6: 157-68, 1997 |
| pyrophosphorylase | |
| maize ESR gene family | Plant J 12: 235-46, 1997 |
| Sorghum α-kafirin | DeRose et al., Plant Mol. Biol 32: 1029-35, 1996 |
| KNOX | Postma-Haarsma et al, Plant Mol. Biol. 39: 257-71, 1999 |
| rice oleosin | Wu et al, J. Biochem. 123: 386, 1998 |
| sunflower oleosin | Cummins et al., Plant Mol. Biol. 19: 873-876, 1992 |
| PRO0117, putative rice 40S | WO 2004/070039 |
| ribosomal protein | |
| PRO0136, rice alanine | Unpublished |
| aminotransferase | |
| PRO0147, trypsin inhibitor ITR1 | Unpublished |
| (barley) | |
| PRO0151, rice WSI18 | WO 2004/070039 |
| PRO0175, rice RAB21 | WO 2004/070039 |
| PRO005 | WO 2004/070039 |
| PRO0095 | WO 2004/070039 |
| α-amylase (Amy32b) | Lanahan et al, Plant Cell 4: 203-211, 1992; Skriver et al, |
| | Proc Natl Acad Sci USA 88: 7266-7270, 1991 |
| cathepsin β-like gene | Cejudo et al, Plant Mol Biol 20: 849-856, 1992 |
| Barley Ltp2 | Kalla et al., Plant J. 6: 849-60, 1994 |
| Chi26 | Leah et al., Plant J. 4: 579-89, 1994 |
| Maize B-Peru | Selinger et al., Genetics 149; 1125-38, 1998 |

TABLE 3
Examples of embryo-specific promoters:

| Gene source | Reference |
|---|---|
| rice OSH1 | Sato et al, Proc. Natl. Acad. Sci. USA, 93: 8117-8122, |
| | 1996 |
| KNOX | Postma-Haarsma et al, Plant Mol. Biol. 39: 257-71, 1999 |
| PRO0151 | WO 2004/070039 |
| PRO0175 | WO 2004/070039 |
| PRO005 | WO 2004/070039 |
| PRO0095 | WO 2004/070039 |

TABLE 4
Examples of aleurone-specific promoters:

| Gene source | Reference |
|---|---|
| α-amylase | Lanahan et al, Plant Cell 4: 203-211, 1992; Skriver et al, |
| (Amy32b) | Proc Natl Acad Sci USA 88: 7266-7270, 1991 |
| cathepsin β- | Cejudo et al, Plant Mol Biol 20: 849-856, 1992 |
| like gene | |
| Barley Ltp2 | Kalla et al., Plant J. 6: 849-60, 1994 |
| Chi26 | Leah et al., Plant J. 4: 579-89, 1994 |
| Maize B-Peru | Selinger et al., Genetics 149; 1125-38, 1998 |

### Constitutive Promoter

[0062] A “constitutive promoter” refers to a promoter that is transcriptionally active during most, but not necessarily all, phases of its growth and development and under most environmental conditions, in at least one cell, tissue or organ.

TABLE 5
Examples of constitutive promoters

| Gene Source | Reference |
|---|---|
| Actin | McElroy et al, Plant Cell, 2: 163-171, 1990 |
| HMGP | WO 2004/070039 |
| CAMV 35S | Odell et al, Nature, 313: 810-812, 1985 |
| CaMV 19S | Nilsson et al., Physiol. Plant. 100: 456-462, 1997 |
| GOS2 | de Pater et al, Plant J Nov; 2(6): 837-44, 1992, |
| | WO 2004/065596 |
| Ubiquitin | Christensen et al, Plant Mol. Biol. 18: 675-689, 1992 |
| Rice cyclophilin | Buchholz et al, Plant Mol Biol. 25(5): 837-43, 1994 |
| Maize H3 histone | Lepetit et al, Mol. Gen. Genet. 231: 276-285, 1992 |
| Alfalfa H3 | Wu et al. Plant Mol. Biol. 11: 641-649, 1988 |
| histone | |
| Actin 2 | An et al, Plant J. 10(1); 107-121, 1996 |
| 34S FMV | Sanger et al., Plant. Mol. Biol., 14, 1990: 433-443 |
| Rubisco small | U.S. Pat. No. 4,962,028 |
| subunit | |
| OCS | Leisner (1988) Proc Natl Acad Sci USA 85(5): 2553 |
| SAD1 | Jain et al., Crop Science, 39 (6), 1999: 1696 |
| SAD2 | Jain et al., Crop Science, 39 (6), 1999: 1696 |
| nos | Shaw et al. (1984) Nucleic Acids Res. 12(20): |
| | 7831-7846 |
| V-ATPase | WO 01/14572 |
| Super promoter | WO 95/14098 |
| G-box proteins | WO 94/12015 |

### Ubiquitous Promoter

[0063] A Ubiquitous promoter is active in substantially all tissues or cells of an organism.

### Green Tissue-Specific Promoter

[0064] A green tissue-specific promoter as defined herein is a promoter that is transcriptionally active predominantly in green tissue, substantially to the exclusion of any other parts of a plant, whilst still allowing for any leaky expression in these other plant parts.

[0065] Examples of green tissue-specific promoters which may be used to perform the methods of the invention are shown in Table 6 below.

TABLE 6
Examples of green tissue-specific promoters

| Gene | Expression | Reference |
|---|---|---|
| Maize Orthophosphate dikinase | Leaf specific | Fukavama et al., 2001 |
| Maize Phosphoenolpyruvate | Leaf specific | Kausch et al., 2001 |
| carboxylase | | |
| Rice Phosphoenolpyruvate | Leaf specific | Liu et al., 2003 |
| carboxylase | | |
| Rice small subunit Rubisco | Leaf specific | Nomura et al., 2000 |
| rice beta expansin EXBP9 | Shoot specific | WO 2004/070039 |
| Pigeonpea small subunit Rubisco | Leaf specific | Panguluri et al., 2005 |
| Pea RBCS3A | Leaf specific | |

[0066] Another example of a tissue-specific promoter is a meristem-specific promoter, which is transcriptionally active predominantly in meristematic tissue, substantially to the exclusion of any other parts of a plant, whilst still allowing for any leaky expression in these other plant parts. Examples of green meristem-specific promoters which may be used to perform the methods of the invention are shown in Table 7 below.

TABLE 7
Examples of meristem-specific promoters

| Gene source | Expression pattern | Reference |
|---|---|---|
| rice OSH1 | Shoot apical meristem, | Sato et al. (1996) Proc |
| | from embryo globular stage | . Natl. Acad. Sci. USA, 93: |
| | to seedling stage | 8117-8122 |
| Rice | Meristem specific | BAD87835.1 |
| metallothionein | Shoot and root apical | Wagner & Kohorn (2001) |
| WAK1 & | meristems, and in | Plant Cell 13(2): 303-318 |
| WAK 2 | expanding leaves and sepals | |

### Terminator

[0067] The term “terminator” encompasses a control sequence which is a DNA sequence at the end of a transcriptional unit which signals 3′ processing and polyadenylation of a primary transcript and termination of transcription. The terminator can be derived from the natural gene, from a variety of other plant genes, or from T-DNA. The terminator to be added may be derived from, for example, the nopaline synthase or octopine synthase genes, or alternatively from another plant gene, or less preferably from any other eukaryotic gene.

### Selectable Marker (Gene)/Reporter Gene

[0068] “Selectable marker”, “selectable marker gene” or “reporter gene” includes any gene that confers a phenotype on a cell in which it is expressed to facilitate the identification and/or selection of cells that are transfected or transformed with a nucleic acid construct of the invention. These marker genes enable the identification of a successful transfer of the nucleic acid molecules via a series of different principles. Suitable markers may be selected from markers that confer antibiotic or herbicide resistance, that introduce a new metabolic trait or that allow visual selection. Examples of selectable marker genes include genes conferring resistance to antibiotics (such as nptII that phosphorylates neomycin and kanamycin, or hpt, phosphorylating hygromycin, or genes conferring resistance to, for example, bleomycin, streptomycin, tetracyclin, chloramphenicol, ampicillin, gentamycin, geneticin (G418), spectinomycin or blasticidin), to herbicides (for example bar which provides resistance to Basta®; aroA or gox providing resistance against glyphosate, or the genes conferring resistance to, for example, imidazolinone, phosphinothricin or sulfonylurea), or genes that provide a metabolic trait (such as manA that allows plants to use mannose as sole carbon source or xylose isomerase for the utilisation of xylose, or antinutritive markers such as the resistance to 2-deoxyglucose). Expression of visual marker genes results in the formation of colour (for example β-glucuronidase, GUS or β-galactosidase with its coloured substrates, for example X-Gal), luminescence (such as the luciferin/luciferase system) or fluorescence (Green Fluorescent Protein, GFP, and derivatives thereof). This list represents only a small number of possible markers. The skilled worker is familiar with such markers. Different markers are preferred, depending on the organism and the selection method.

### Transgenic/Transgene/Recombinant

[0069] For the purposes of the invention, “transgenic”, “transgene” or “recombinant” means with regard to, for example, a nucleic acid sequence, an expression cassette, gene construct or a vector comprising the nucleic acid sequence or an organism transformed with the nucleic acid sequences, expression cassettes or vectors according to the invention, all those constructions brought about by recombinant methods in which either
[0070] (a) the nucleic acid sequences encoding proteins useful in the methods of the invention, or
[0071] (b) genetic control sequence(s) which is operably linked with the nucleic acid sequence according to the invention, for example a promoter, or
[0072] (c) a) and b)
   are not located in their natural genetic environment or have been modified by recombinant methods, it being possible for the modification to take the form of, for example, a substitution, addition, deletion, inversion or insertion of one or more nucleotide residues. The natural genetic environment is understood as meaning the natural genomic or chromosomal locus in the original plant or the presence in a genomic library. In the case of a genomic library, the natural genetic environment of the nucleic acid sequence is preferably retained, at least in part. The environment flanks the nucleic acid sequence at least on one side and has a sequence length of at least 50 bp, preferably at least 500 bp, especially preferably at least 1000 bp, most preferably at least 5000 bp. A naturally occurring expression cassette—for example the naturally occurring combination of the natural promoter of the nucleic acid sequences with the corresponding nucleic acid sequence encoding a polypeptide useful in the methods of the present invention, as defined above—becomes a transgenic expression cassette when this expression cassette is modified by non-natural, synthetic (“artificial”) methods such as, for example, mutagenic treatment. Suitable methods are described, for example, in U.S. Pat. No. 5,565,350 or WO 00/15815.

[0073] A transgenic plant for the purposes of the invention is thus understood as meaning, as above, that the nucleic acids used in the method of the invention are not at their natural locus in the genome of said plant, it being possible for the nucleic acids to be expressed homologously or heterologously. However, as mentioned, transgenic also means that, while the nucleic acids according to the invention or used in the inventive method are at their natural position in the genome of a plant, the sequence has been modified with regard to the natural sequence, and/or that the regulatory sequences of the natural sequences have been modified. Transgenic is preferably understood as meaning the expression of the nucleic acids according to the invention at an unnatural locus in the genome, i.e. homologous or, preferably, heterologous expression of the nucleic acids takes place. Preferred transgenic plants are mentioned herein.

### Transformation

[0074] The term “introduction” or “transformation” as referred to herein encompasses the transfer of an exogenous polynucleotide into a host cell, irrespective of the method used for transfer. Plant tissue capable of subsequent clonal propagation, whether by organogenesis or embryogenesis, may be transformed with a genetic construct of the present invention and a whole plant regenerated there from. The particular tissue chosen will vary depending on the clonal propagation systems available for, and best suited to, the particular species being transformed. Exemplary tissue targets include leaf disks, pollen, embryos, cotyledons, hypocotyls, megagametophytes, callus tissue, existing meristematic tissue (e.g., apical meristem, axillary buds, and root meristems), and induced meristem tissue (e.g., cotyledon meristem and hypocotyl meristem). The polynucleotide may be transiently or stably introduced into a host cell and may be maintained non-integrated, for example, as a plasmid. Alternatively, it may be integrated into the host genome. The resulting transformed plant cell may then be used to regenerate a transformed plant in a manner known to persons skilled in the art.

[0075] The transfer of foreign genes into the genome of a plant is called transformation. Transformation of plant species is now a fairly routine technique. Advantageously, any of several transformation methods may be used to introduce the gene of interest into a suitable ancestor cell. The methods described for the transformation and regeneration of plants from plant tissues or plant cells may be utilized for transient or for stable transformation. Transformation methods include the use of liposomes, electroporation, chemicals that increase free DNA uptake, injection of the DNA directly into the plant, particle gun bombardment, transformation using viruses or pollen and microprojection. Methods may be selected from the calcium/polyethylene glycol method for protoplasts (Krens, F. A. et al., (1982) Nature 296, 72-74; Negrutiu I et al. (1987) Plant Mol Biol 8: 363-373); electroporation of protoplasts (Shillito R. D. et al. (1985) Bio/Technol 3, 1099-1102); microinjection into plant material (Crossway A et al., (1986) Mol. Gen Genet 202: 179-185); DNA or RNA-coated particle bombardment (Klein T M et al., (1987) Nature 327: 70) infection with (non-integrative) viruses and the like. Transgenic plants, including transgenic crop plants, are preferably produced via Agrobacterium-mediated transformation. An advantageous transformation method is the transformation in planta. To this end, it is possible, for example, to allow the agrobacteria to act on plant seeds or to inoculate the plant meristem with agrobacteria. It has proved particularly expedient in accordance with the invention to allow a suspension of transformed agrobacteria to act on the intact plant or at least on the flower primordia. The plant is subsequently grown on until the seeds of the treated plant are obtained (Clough and Bent, Plant J. (1998) 16, 735-743). Methods for Agrobacterium-mediated transformation of rice include well known methods for rice transformation, such as those described in any of the following: European patent application EP 1198985 A1, Aldemita and Hodges (Planta 199: 612-617, 1996); Chan et al. (Plant Mol Biol 22 (3): 491-506, 1993), Hiei et al. (Plant J 6 (2): 271-282, 1994), which disclosures are incorporated by reference herein as if fully set forth. In the case of corn transformation, the preferred method is as described in either Ishida et al. (Nat. Biotechnol 14(6): 745-50, 1996) or Frame et al. (Plant Physiol 129(1): 13-22, 2002), which disclosures are incorporated by reference herein as if fully set forth. Said methods are further described by way of example in B. Jenes et al., Techniques for Gene Transfer, in: Transgenic Plants, Vol. 1, Engineering and Utilization, eds. S. D. Kung and R. Wu, Academic Press (1993) 128-143 and in Potrykus Annu. Rev. Plant Physiol. Plant Molec. Biol. 42 (1991) 205-225). The nucleic acids or the construct to be expressed is preferably cloned into a vector, which is suitable for transforming Agrobacterium tumefaciens, for example pBin19 (Bevan et al., Nucl. Acids Res. 12 (1984) 8711). Agrobacteria transformed by such a vector can then be used in known manner for the transformation of plants, such as plants used as a model, like Arabidopsis (Arabidopsis thaliana is within the scope of the present invention not considered as a crop plant), or crop plants such as, by way of example, tobacco plants, for example by immersing bruised leaves or chopped leaves in an agrobacterial solution and then culturing them in suitable media. The transformation of plants by means of Agrobacterium tumefaciens is described, for example, by Höfgen and Willmitzer in Nucl. Acid Res. (1988) 16, 9877 or is known inter alia from F. F. White, Vectors for Gene Transfer in Higher Plants; in Transgenic Plants, Vol. 1, Engineering and Utilization, eds. S. D. Kung and R. Wu, Academic Press, 1993, pp. 15-38.

[0076] In addition to the transformation of somatic cells, which then have to be regenerated into intact plants, it is also possible to transform the cells of plant meristems and in particular those cells which develop into gametes. In this case, the transformed gametes follow the natural plant development, giving rise to transgenic plants. Thus, for example, seeds of Arabidopsis are treated with agrobacteria and seeds are obtained from the developing plants of which a certain proportion is transformed and thus transgenic [Feldman, K A and Marks M D (1987). Mol Gen Genet 208:274-289; Feldmann K (1992). In: C Koncz, N-H Chua and J Shell, eds, Methods in Arabidopsis Research. Word Scientific, Singapore, pp. 274-289]. Alternative methods are based on the repeated removal of the inflorescences and incubation of the excision site in the center of the rosette with transformed agrobacteria, whereby transformed seeds can likewise be obtained at a later point in time (Chang (1994). Plant J. 5: 551-558; Katavic (1994). Mol Gen Genet, 245: 363-370). However, an especially effective method is the vacuum infiltration method with its modifications such as the “floral dip” method. In the case of vacuum infiltration of Arabidopsis, intact plants under reduced pressure are treated with an agrobacterial suspension [Bechthold, N (1993). C R Acad Sci Paris Life Sci, 316: 1194-1199], while in the case of the “floral dip” method the developing floral tissue is incubated briefly with a surfactant-treated agrobacterial suspension [Clough, S J and Bent, A F (1998). The Plant J. 16, 735-743]. A certain proportion of transgenic seeds are harvested in both cases, and these seeds can be distinguished from non-transgenic seeds by growing under the above-described selective conditions. In addition the stable transformation of plastids is of advantages because plastids are inherited maternally is most crops reducing or eliminating the risk of transgene flow through pollen. The transformation of the chloroplast genome is generally achieved by a process which has been schematically displayed in Klaus et al., 2004 [Nature Biotechnology 22 (2), 225-229]. Briefly the sequences to be transformed are cloned together with a selectable marker gene between flanking sequences homologous to the chloroplast genome. These homologous flanking sequences direct site specific integration into the plastome. Plastidal transformation has been described for many different plant species and an overview is given in Bock (2001) Transgenic plastids in basic research and plant biotechnology. J Mol Biol. 2001 Sep. 21; 312 (3):425-38 or Maliga, P (2003) Progress towards commercialization of plastid transformation technology. Trends Biotechnol. 21, 20-28. Further biotechnological progress has recently been reported in form of marker free plastid transformants, which can be produced by a transient co-integrated maker gene (Klaus et al., 2004, Nature Biotechnology 22(2), 225-229).

### T-DNA Activation Tagging

[0077] T-DNA activation tagging (Hayashi et al. Science (1992) 1350-1353), involves insertion of T-DNA, usually containing a promoter (may also be a translation enhancer or an intron), in the genomic region of the gene of interest or 10 kb up- or downstream of the coding region of a gene in a configuration such that the promoter directs expression of the targeted gene. Typically, regulation of expression of the targeted gene by its natural promoter is disrupted and the gene falls under the control of the newly introduced promoter. The promoter is typically embedded in a T-DNA. This T-DNA is randomly inserted into the plant genome, for example, through Agrobacterium infection and leads to modified expression of genes near the inserted T-DNA. The resulting transgenic plants show dominant phenotypes due to modified expression of genes close to the introduced promoter.

### TILLING

[0078] TILLING (Targeted Induced Local Lesions In Genomes) is a mutagenesis technology useful to generate and/or identify nucleic acids encoding proteins with modified expression and/or activity. TILLING also allows selection of plants carrying such mutant variants. These mutant variants may exhibit modified expression, either in strength or in location or in timing (if the mutations affect the promoter for example). These mutant variants may exhibit higher activity than that exhibited by the gene in its natural form. TILLING combines high-density mutagenesis with high-throughput screening methods. The steps typically followed in TILLING are: (a) EMS mutagenesis (Redei G P and Koncz C (1992) In Methods in Arabidopsis Research, Koncz C, Chua N H, Schell J, eds. Singapore, World Scientific Publishing Co, pp. 16-82; Feldmann et al., (1994) In Meyerowitz E M, Somerville C R, eds, Arabidopsis. Cold Spring Harbor Laboratory Press, Cold Spring Harbor, N.Y., pp 137-172; Lightner J and Caspar T (1998) In J Martinez-Zapater, J Salinas, eds, Methods on Molecular Biology, Vol. 82. Humana Press, Totowa, N.J., pp 91-104); (b) DNA preparation and pooling of individuals; (c) PCR amplification of a region of interest; (d) denaturation and annealing to allow formation of heteroduplexes; (e) DHPLC, where the presence of a heteroduplex in a pool is detected as an extra peak in the chromatogram; (f) identification of the mutant individual; and (g) sequencing of the mutant PCR product. Methods for TILLING are well known in the art (McCallum et al., (2000) Nat Biotechnol 18: 455-457; reviewed by Stemple (2004) Nat Rev Genet 5(2): 145-50).

### Homologous Recombination

[0079] Homologous recombination allows introduction in a genome of a selected nucleic acid at a defined selected position. Homologous recombination is a standard technology used routinely in biological sciences for lower organisms such as yeast or the moss Physcomitrella. Methods for performing homologous recombination in plants have been described not only for model plants (Offring a et al. (1990) EMBO J 9(10): 3077-84) but also for crop plants, for example rice (Terada et al. (2002) Nat Biotech 20(10): 1030-4; Iida and Terada (2004) Curr Opin Biotech 15(2): 132-8).

### Yield

[0080] The term “yield” in general means a measurable produce of economic value, necessarily related to a specified crop, to an area, and to a period of time. Individual plant parts directly contribute to yield based on their number, size and/or weight, or the actual yield is the yield per acre for a crop and year, which is determined by dividing total production (includes both harvested and appraised production) by planted acres.

### Increase/Improve/Enhance

[0081] The terms “increase”, “improve” or “enhance” are interchangeable and shall mean in the sense of the application at least a 5%, 6%, 7%, 8%, 9% or 10%, preferably at least 15% or 20%, more preferably 25%, 30%, 35% or 40% more yield and/or growth in comparison to control plants as defined herein.

### Seed Yield

[0082] Increased seed yield may manifest itself as one or more of the following: a) an increase in seed biomass (total seed weight) which may be on an individual seed basis and/or per plant and/or per hectare or acre; b) increased number of flowers per plant; c) increased number of (filled) seeds; d) increased seed filling rate (which is expressed as the ratio between the number of filled seeds divided by the total number of seeds); e) increased harvest index, which is expressed as a ratio of the yield of harvestable parts, such as seeds, divided by the total biomass; and f) increased thousand kernel weight (TKW), which is extrapolated from the number of filled seeds counted and their total weight. An increased TKW may result from an increased seed size and/or seed weight, and may also result from an increase in embryo and/or endosperm size.

[0083] An increase in seed yield may also be manifested as an increase in seed size and/or seed volume. Furthermore, an increase in seed yield may also manifest itself as an increase in seed area and/or seed length and/or seed width and/or seed perimeter. Increased yield may also result in modified architecture, or may occur because of modified architecture.

### Plant

[0084] The term “plant” as used herein encompasses whole plants, ancestors and progeny of the plants and plant parts, including seeds, shoots, stems, leaves, roots (including tubers), flowers, and tissues and organs, wherein each of the aforementioned comprise the gene/nucleic acid of interest. The term “plant” also encompasses plant cells, suspension cultures, callus tissue, embryos, meristematic regions, gametophytes, sporophytes, pollen and microspores, again wherein each of the aforementioned comprises the gene/nucleic acid of interest.

[0085] Plants that are particularly useful in the methods of the invention include all plants which belong to the superfamily Viridiplantae, in particular monocotyledonous and dicotyledonous plants including fodder or forage legumes, ornamental plants, food crops, trees or shrubs selected from the list comprising Acer spp., Actinidia spp., Abelmoschus spp., Agave sisalana, Agropyron spp., Agrostis stolonifera, Allium spp., Amaranthus spp., Ammophila arenaria, Ananas comosus, Annona spp., Apium graveolens, Arachis spp, Artocarpus spp., Asparagus officinalis, Avena spp. (e.g. Avena sativa, Avena fatua, Avena byzantina, Avena fatua var. sativa, Avena hybrida), Averrhoa carambola, Bambusa sp., Benincasa hispida, Bertholletia excelsea, Beta vulgaris, Brassica spp. (e.g. Brassica napus, Brassica rapa spp. [canola, oilseed rape, turnip rape]), Cadaba farinosa, Camellia sinensis, Canna indica, Cannabis sativa, Capsicum spp., Carex elata, Carica papaya, Carissa macrocarpa, Carya spp., Carthamus tinctorius, Castanea spp., Ceiba pentandra, Cichorium endivia, Cinnamomum spp., Citrullus lanatus, Citrus spp., Cocos spp., Coffea spp., Colocasia esculenta, Cola spp., Corchorus sp., Coriandrum sativum, Corylus spp., Crataegus spp., Crocus sativus, Cucurbita spp., Cucumis spp., Cynara spp., Daucus carota, Desmodium spp., Dimocarpus longan, Dioscorea spp., Diospyros spp., Echinochloa spp., Elaeis (e.g. Elaeis guineensis, Elaeis oleifera), Eleusine coracana, Erianthus sp., Eriobotrya japonica, Eucalyptus sp., Eugenia uniflora, Fagopyrum spp., Fagus spp., Festuca arundinacea, Ficus carica, Fortunella spp., Fragaria spp., Ginkgo biloba, Glycine spp. (e.g. Glycine max, Soja hispida or Soja max), Gossypium hirsutum, Helianthus spp. (e.g. Helianthus annuus), Hemerocallis fulva, Hibiscus spp., Hordeum spp. (e.g. Hordeum vulgare), Ipomoea batatas, Juglans spp., Lactuca sativa, Lathyrus spp., Lens culinaris, Linum usitatissimum, Litchi chinensis, Lotus spp., Luffa acutangula, Lupinus spp., Luzula sylvatica, Lycopersicon spp. (e.g. Lycopersicon esculentum, Lycopersicon lycopersicum, Lycopersicon pyriforme), Macrotyloma spp., Malus spp., Malpighia emarginata, Mammea americana, Mangifera indica, Manihot spp., Manilkara zapota, Medicago sativa, Melilotus spp., Mentha spp., Miscanthus sinensis, Momordica spp., Morus nigra, Musa spp., Nicotiana spp., Olea spp., Opuntia spp., Ornithopus spp., Oryza spp. (e.g. Oryza sativa, Oryza latifolia), Panicum miliaceum, Panicum virgatum, Passiflora edulis, Pastinaca sativa, Pennisetum sp., Persea spp., Petroselinum crispum, Phalaris arundinacea, Phaseolus spp., Phleum pratense, Phoenix spp., Phragmites australis, Physalis spp., Pinus spp., Pistacia vera, Pisum spp., Poa spp., Populus spp., Prosopis spp., Prunus spp., Psidium spp., Punica granatum, Pyrus communis, Quercus spp., Raphanus sativus, Rheum rhabarbarum, Ribes spp., Ricinus communis, Rubus spp., Saccharum spp., Salix sp., Sambucus spp., Secale cereale, Sesamum spp., Sinapis sp., Solanum spp. (e.g. Solanum tuberosum, Solanum integrifolium or Solanum lycopersicum), Sorghum bicolor, Spinacia spp., Syzygium spp., Tagetes spp., Tamarindus indica, Theobroma cacao, Trifolium spp., Triticosecale rimpaui, Triticum spp. (e.g. Triticum aestivum, Triticum durum, Triticum turgidum, Triticum hybernum, Triticum macha, Triticum sativum or Triticum vulgare), Tropaeolum minus, Tropaeolum majus, Vaccinium spp., Vicia spp., Vigna spp., Viola odorata, Vitis spp., Zea mays, Zizania palustris, Ziziphus spp., amongst others.

### DETAILED DESCRIPTION OF THE INVENTION

### (i) VPE

[0086] According to a first embodiment, the present invention provides a method for enhancing yield-related traits in plants relative to control plants, comprising modulating expression in a plant of a nucleic acid encoding a VPE.

[0087] The present invention also provides hitherto unknown VPE-encoding nucleic acids and VPEs. These sequences also being useful in performing the methods of the invention.

[0088] According to a further embodiment of the present invention, there is therefore provided an isolated nucleic acid molecule comprising:

[0089] (i) a nucleic acid represented by SEQ ID NO: 151, SEQ ID NO: 153, SEQ ID NO: 155, SEQ ID NO: 157, SEQ ID NO: 159, SEQ ID NO: 161, SEQ ID NO: 163, SEQ ID NO: 165, SEQ ID NO: 167, SEQ ID NO: 169, SEQ ID NO: 171;
[0090] (ii) the complement of any one of the SEQ ID NOs given in (i);
[0091] (iii) a nucleic acid encoding a VPE having, in increasing order of preference, at least 70% 75%, 80%, 85%, 90%, 95%, 96%, 97%, 98%, 99% or 100% sequence identity to any one of the amino acid sequences given in SEQ ID NO: 152, SEQ ID NO: 154 and SEQ ID NO: 156, SEQ ID NO: 158, SEQ ID NO: 160, SEQ ID NO: 162, SEQ ID NO: 164, SEQ ID NO: 166, SEQ ID NO: 168, SEQ ID NO: 170, SEQ ID NO: 172;
[0092] (iv) a nucleic acid capable of hybridizing under stringent conditions to any one of the nucleic acids given in (i), (ii) or (iii) above.

[0093] According to a further embodiment of the present invention, there is also provided an isolated polypeptide comprising:
[0094] (i) an amino acid sequence represented by any one of SEQ ID NO: 152, SEQ ID NO: 154 and SEQ ID NO: 156, SEQ ID NO: 158, SEQ ID NO: 160, SEQ ID NO: 162, SEQ ID NO: 164, SEQ ID NO: 166, SEQ ID NO: 168, SEQ ID NO: 170, SEQ ID NO: 172;
[0095] (ii) an amino acid sequence having, in increasing order of preference, at least at least 70%, 75%, 80%, 85%, 90%, 95%, 96%, 97%, 98%, 99% or 100% sequence identity to any one of the amino acid sequences given in SEQ ID NO: 152, SEQ ID NO: 154 and SEQ ID NO: 156, SEQ ID NO: 158, SEQ ID NO: 160, SEQ ID NO: 162, SEQ ID NO: 164, SEQ ID NO: 166, SEQ ID NO: 168, SEQ ID NO: 170, SEQ ID NO: 172;
[0096] (iii) derivatives of any of the amino acid sequences given in (i) or (ii) above.

[0097] A preferred method for modulating (preferably, increasing) expression of a nucleic acid encoding a VPE is by introducing and expressing in a plant a nucleic acid encoding a VPE.

[0098] Any reference hereinafter to a “protein useful in the methods of the invention” is taken to mean a VPE as defined herein. Any reference hereinafter to a “nucleic acid useful in the methods of the invention” is taken to mean a nucleic acid capable of encoding such a VPE. The nucleic acid to be introduced into a plant (and therefore useful in performing the methods of the invention) is any nucleic acid encoding the type of protein which will now be described, hereafter also named “VPE nucleic acid” or “VPE gene”.

[0099] A “VPE” as defined herein refers to any vacuolar processing enzyme. VPE are cysteine proteases that cleave a peptide bond at the C-terminal end of asparagine and aspartic acid (Hiraiwa et al. FEBS Letters 447, 1999, pp. 213-216).

[0100] The proteins of the invention are identifiable by the presence of the conserved domains (see FIG. 5 showing the domain structure of a gamma VPEs (VPEg)). VPEg comprise one or more of the following features:
[0101] signal peptide for insertion into the endomembrane system;
[0102] an N-terminal inhibitory domain;
[0103] an active domain;
[0104] a C-terminal inhibitory domain; and
[0105] Conserved Histidine and Cysteine residues.

[0106] The term “domain” is defined in the “definitions section herein. Specialist databases exist for the identification of domains, for example, SMART (Schultz et al. (1998) Proc. Natl. Acad. Sci. USA 95, 5857-5864; Letunic et al. (2002) Nucleic Acids Res 30, 242-244, InterPro (Mulder et al., (2003) Nucl. Acids. Res. 31, 315-318, Prosite (Bucher and Bairoch (1994), A generalized profile syntax for biomolecular sequences motifs and its function in automatic sequence interpretation. (In) ISMB-94; Proceedings 2nd International Conference on Intelligent Systems for Molecular Biology. Altman R., Brutlag D., Karp P., Lathrop R., Searls D., Eds., pp 53-61, AAAIPress, Menlo Park; Hulo et al., Nucl. Acids. Res. 32:D134-D137, (2004), or Pfam (Bateman et al., Nucleic Acids Research 30(1): 276-280 (2002). A set of tools for in silico analysis of protein sequences is available on the ExPASY proteomics server (hosted by the Swiss Institute of Bioinformatics (Gasteiger et al., ExPASy: the proteomics server for in-depth protein knowledge and analysis, Nucleic Acids Res. 31:3784-3788 (2003)). Domains may also be identified using routine techniques, such as by sequence alignment.

[0107] Methods for the alignment of sequences for comparison are well known in the art, such methods include GAP, BESTFIT, BLAST, FASTA and TFASTA. GAP uses the algorithm of Needleman and Wunsch ((1970) J Mol Biol 48: 443-453) to find the global (i.e. spanning the complete sequences) alignment of two sequences that maximizes the number of matches and minimizes the number of gaps. The BLAST algorithm (Altschul et al. (1990) J Mol Biol 215: 403-10) calculates percent sequence identity and performs a statistical analysis of the similarity between the two sequences. The software for performing BLAST analysis is publicly available through the National Centre for Biotechnology Information (NCBI). Homologues may readily be identified using, for example, the ClustalW multiple sequence alignment algorithm (version 1.83), with the default pairwise alignment parameters, and a scoring method in percentage. Global percentages of similarity and identity may also be determined using one of the methods available in the MatGAT software package (Campanella et al., BMC Bioinformatics. 2003 Jul. 10; 4:29. MatGAT: an application that generates similarity/identity matrices using protein or DNA sequences.). Minor manual editing may be performed to optimise alignment between conserved motifs, as would be apparent to a person skilled in the art. Furthermore, instead of using full-length sequences for the identification of homologues, specific domains may also be used. The sequence identity values, which are indicated in the Example section herein as a percentage were determined over the entire nucleic acid or amino acid sequence, and/or over selected domains or conserved motif(s), using the programs mentioned above using the default parameters.

[0108] Furthermore, VPEs (at least in their native form) typically have the following activity. Further details are provided in the Examples section herein.

[0109] The VPE represented by SEQ ID NO: 150 is an enzyme with an Enzyme Commission (EC) number EC 3.4.22.34 for http://www.ebi.ac.uk/intenz/query?cmd=Search EC&ec=3.4.22.34&status=OK legumain (also called asparaginyl endopeptidase). Asparaginyl endopeptidases catalyse the hydrolysis of proteins and small molecule substrates at Asn-|-Xaa- bonds. Peptidases in this class are not inhibited by compound E-64. VPEg (VPE gamma) has been shown to exhibit protease activity towards Asp residues and towards an Asp-Gln bond to remove the N-terminal propeptide (Haraiwa et al. 1999, FEBS 447: 213-216). Alternative methods to detect protease activity of VPE proteins have been reported (see for example Kuroyanagi, The Journal of Biological Chemistry Vol. 280, No. 38, pp. 32914-32920).

[0110] VPEs also typically exhibit CASPASE I activity (see Hatsugai et al., (Science VOL 305 6 AUGUST 2004) and Rojo et al., 2004 (Current Biology, Vol. 14, pp 1897-1906)). The following active pentapetide site in caspases is reported: E(A/G)CES (SEQ ID NO: 209).

[0111] The present invention is illustrated by transforming plants with the nucleic acid sequence represented by SEQ ID NO: 149, encoding the polypeptide sequence of SEQ ID NO: 150. However, performance of the invention is not restricted to these sequences; the methods of the invention may advantageously be performed using any VPE-encoding nucleic acid or VPE as defined herein.

[0112] Examples of nucleic acids encoding VPEs are given in the Examples section herein. Such nucleic acids are useful in performing the methods of the invention. The amino acid sequences given in the Examples are example sequences of orthologues and paralogues of the VPE represented by SEQ ID NO: 150, the terms “orthologues” and “paralogues” being as defined herein. Further orthologues and paralogues may readily be identified by performing a so-called reciprocal blast search. Typically, this involves a first BLAST involving BLASTing a query sequence (for example using any of the sequences listed in the table in the Examples against any sequence database, such as the publicly available NCBI database. BLASTN or TBLASTX (using standard default values) are generally used when starting from a nucleotide sequence, and BLASTP or TBLASTN (using standard default values) when starting from a protein sequence. The BLAST results may optionally be filtered. The full-length sequences of either the filtered results or non-filtered results are then BLASTed back (second BLAST) against sequences from the organism from which the query sequence is derived (where the query sequence is SEQ ID NO: 149 or SEQ ID NO: 150, the second BLAST would therefore be against Arabidopsis sequences). The results of the first and second BLASTs are then compared. A paralogue is identified if a high-ranking hit from the first blast is from the same species as from which the query sequence is derived, a BLAST back then ideally results in the query sequence as highest hit; an orthologue is identified if a high-ranking hit in the first BLAST is not from the same species as from which the query sequence is derived, and preferably results upon BLAST back in the query sequence being among the highest hits.

[0113] High-ranking hits are those having a low E-value. The lower the E-value, the more significant the score (or in other words the lower the chance that the hit was found by chance). Computation of the E-value is well known in the art. In addition to E-values, comparisons are also scored by percentage identity. Percentage identity refers to the number of identical nucleotides (or amino acids) between the two compared nucleic acid (or polypeptide) sequences over a particular length. In the case of large families, ClustalW may be used, followed by a neighbour joining tree, to help visualize clustering of related genes and to identify orthologues and paralogues.

[0114] Nucleic acid variants may also be useful in practising the methods of the invention. Examples of such variants include nucleic acids encoding homologues and derivatives of any one of the amino acid sequences given in Table B1 of the Examples section, the terms “homologue” and “derivative” being as defined herein. Also useful in the methods of the invention are nucleic acids encoding homologues and derivatives of orthologues or paralogues of any one of the amino acid sequences given in Table B1 of the Examples section. Homologues and derivatives useful in the methods of the present invention have substantially the same biological and functional activity as the unmodified protein from which they are derived.

[0115] Further nucleic acid variants useful in practising the methods of the invention include portions of nucleic acids encoding VPEs, nucleic acids hybridising to nucleic acids encoding VPEs, splice variants of nucleic acids encoding VPEs, allelic variants of nucleic acids encoding VPEs and variants of nucleic acids encoding VPEs obtained by gene shuffling. The terms hybridising sequence, splice variant, allelic variant and gene shuffling are as described herein.

[0116] Nucleic acids encoding VPEs need not be full-length nucleic acids, since performance of the methods of the invention does not rely on the use of full-length nucleic acid sequences. According to the present invention, there is provided a method for enhancing yield-related traits in plants, comprising introducing and expressing in a plant a portion of any one of the nucleic acid sequences given in Table B1 in the Examples section, or a portion of a nucleic acid encoding an orthologue, paralogue or homologue of any of the amino acid sequences given in Table B1.

[0117] A portion of a nucleic acid may be prepared, for example, by making one or more deletions to the nucleic acid. The portions may be used in isolated form or they may be fused to other coding (or non-coding) sequences in order to, for example, produce a protein that combines several activities. When fused to other coding sequences, the resultant polypeptide produced upon translation may be bigger than that predicted for the protein portion.

[0118] Portions useful in the methods of the invention, encode a VPE as defined herein, and have substantially the same biological activity as the amino acid sequences given in Table B1 in the Examples section. Preferably, the portion is a portion of any one of the nucleic acids given in Table B1 of the Examples section, or is a portion of a nucleic acid encoding an orthologue or paralogue of any one of the amino acid sequences given in Table B1. The portion is typically at least 800 consecutive nucleotides in length, preferably at least 1,000 consecutive nucleotides in length, more preferably at least 1,200 consecutive nucleotides in length and most preferably at least 1,500 consecutive nucleotides in length, the consecutive nucleotides being of any one of the nucleic acid sequences given in Table B1 of the Examples, or of a nucleic acid encoding an orthologue or paralogue of any one of the amino acid sequences given in Table B1. Most preferably the portion is a portion of the nucleic acid of SEQ ID NO: 149. Preferably, the portion encodes an amino acid sequence comprising (any one or more of the domains defined herein. Preferably, the portion encodes an amino acid sequence which when used in the construction of a VPE phylogenetic tree, such as the one depicted in FIG. 6, tends to cluster with the group of gamma VPEs comprising the amino acid sequence represented by SEQ ID NO: 150 rather than with any other group.

[0119] Another nucleic acid variant useful in the methods of the invention is a nucleic acid capable of hybridising, under reduced stringency conditions, preferably under stringent conditions, with a nucleic acid encoding a VPE as defined herein, or with a portion as defined herein.

[0120] According to the present invention, there is provided a method for enhancing yield-related traits in plants, comprising introducing and expressing in a plant a nucleic acid capable of hybridizing to any one of the nucleic acids given in Table B1 of the Examples section, or comprising introducing and expressing in a plant a nucleic acid capable of hybridising to a nucleic acid encoding an orthologue, paralogue or homologue of any of the nucleic acid sequences given in Table B1 of the Examples.

[0121] Hybridising sequences useful in the methods of the invention encode a VPE as defined herein, and have substantially the same biological activity as the amino acid sequences given in Table B1 of the Examples. Preferably, the hybridising sequence is capable of hybridising to any one of the nucleic acids given in Table B1, or to a portion of any of these sequences, a portion being as defined above, or wherein the hybridising sequence is capable of hybridising to a nucleic acid encoding an orthologue or paralogue of any one of the amino acid sequences given in Table B1. Most preferably, the hybridising sequence is capable of hybridising to a nucleic acid as represented by SEQ ID NO: 149 or to a portion thereof. Preferably, the hybridising sequence encodes an amino acid sequence comprising any one or more of the motifs or domains as defined herein. Preferably, the hybridising sequence encodes an amino acid sequence which when used in the construction of a VPE phylogenetic tree, such as the one depicted in FIG. 6, tends to cluster with the group of gamma VPEs comprising the amino acid sequence represented by SEQ ID NO: 150 rather than with any other group.

[0122] Another nucleic acid variant useful in the methods of the invention is a splice variant encoding a VPE as defined hereinabove, a splice variant being as defined herein.

[0123] According to the present invention, there is provided a method for enhancing yield-related traits in plants, comprising introducing and expressing in a plant a splice variant of any one of the nucleic acid sequences given in Table B1 in the Examples, or a splice variant of a nucleic acid encoding an orthologue, paralogue or homologue of any of the amino acid sequences given in Table B1.

[0124] Preferred splice variants are splice variants of a nucleic acid represented by SEQ ID NO: 149, or a splice variant of a nucleic acid encoding an orthologue or paralogue of SEQ ID NO: 150. Preferably, the amino acid sequence encoded by the splice variant comprises any one or more of the motifs or domains as defined herein. Preferably, the amino acid sequence encoded by the splice variant, when used in the construction of a VPE phylogenetic tree, such as the one depicted in FIG. 6, tends to cluster with the group of gamma VPEs comprising the amino acid sequence represented by SEQ ID NO: 150 rather than with any other group.

[0125] Another nucleic acid variant useful in performing the methods of the invention is an allelic variant of a nucleic acid encoding a VPE as defined hereinabove, an allelic variant being as defined herein.

[0126] According to the present invention, there is provided a method for enhancing yield-related traits in plants, comprising introducing and expressing in a plant an allelic variant of any one of the nucleic acids given in Table B1 of the Examples, or comprising introducing and expressing in a plant an allelic variant of a nucleic acid encoding an orthologue, paralogue or homologue of any of the amino acid sequences given in Table B1.

[0127] The allelic variants useful in the methods of the present invention have substantially the same biological activity as the VPE of SEQ ID NO: 150 and any of the amino acids depicted in Table B1 of the Examples section. Allelic variants exist in nature, and encompassed within the methods of the present invention is the use of these natural alleles. Preferably, the allelic variant is an allelic variant of SEQ ID NO: 149 or an allelic variant of a nucleic acid encoding an orthologue or paralogue of SEQ ID NO: 150. Preferably, the amino acid encoded by the allelic variant comprises any one or more of the motifs or domains as defined herein. Preferably, the amino acid sequence encoded by the allelic variant, when used in the construction of a VPE phylogenetic tree, such as the one depicted in FIG. 6, tends to cluster with the group of gamma VPE proteins comprising the amino acid sequence represented by SEQ ID NO: 150 rather than with any other group.

[0128] Gene shuffling or directed evolution may also be used to generate variants of nucleic acids encoding VPEs as defined above; the term “gene shuffling” being as defined herein.

[0129] According to the present invention, there is provided a method for enhancing yield-related traits in plants, comprising introducing and expressing in a plant a variant of any one of the nucleic acid sequences given in Table B1 of the Example, or comprising introducing and expressing in a plant a variant of a nucleic acid encoding an orthologue, paralogue or homologue of any of the amino acid sequences given in Table B1 shown in the Examples section, which variant nucleic acid is obtained by gene shuffling.

[0130] Preferably, the variant nucleic acid obtained by gene shuffling encodes an amino acid sequence comprising any one or more of the motifs or domains as defined herein. Preferably, the amino acid sequence encoded by the variant nucleic acid obtained by gene shuffling, when used in the construction of a VPE phylogenetic tree such as the one depicted in FIG. 6, tends to cluster with the group of gamma VPEs comprising the amino acid sequence represented by SEQ ID NO: 150 rather than with any other group.

[0131] Furthermore, nucleic acid variants may also be obtained by site-directed mutagenesis. Several methods are available to achieve site-directed mutagenesis, the most common being PCR based methods (Current Protocols in Molecular Biology. Wiley Eds.).

[0132] Nucleic acids encoding VPEs proteins may be derived from any natural or artificial source. The nucleic acid may be modified from its native form in composition and/or genomic environment through deliberate human manipulation. Preferably the VPE-encoding nucleic acid is from a plant, further preferably from a dicotyledonous plant, more preferably from the brassica family, most preferably the nucleic acid is from Arabidopsis thaliana.

[0133] Performance of the methods of the invention gives plants having enhanced yield-related traits. In particular performance of the methods of the invention gives plants having increased yield, especially increased seed yield relative to control plants. The terms “yield” and “seed yield” are described in more detail in the “definitions” section herein.

[0134] Reference herein to enhanced yield-related traits is taken to mean an increase in biomass (weight) of one or more parts of a plant, which may include aboveground (harvestable) parts and/or (harvestable) parts below ground. In particular, such harvestable parts are seeds, and performance of the methods of the invention results in plants having increased seed yield relative to the seed yield of suitable control plants.

[0135] Taking corn as an example, a yield increase may be manifested as one or more of the following: increase in the number of plants established per hectare or acre, an increase in the number of ears per plant, an increase in the number of rows, number of kernels per row, kernel weight, thousand kernel weight, ear length/diameter, increase in the seed filling rate (which is the number of filled seeds divided by the total number of seeds and multiplied by 100), among others. Taking rice as an example, a yield increase may manifest itself as an increase in one or more of the following: number of plants per hectare or acre, number of panicles per plant, number of spikelets per panicle, number of flowers (florets) per panicle (which is expressed as a ratio of the number of filled seeds over the number of primary panicles), increase in the seed filling rate (which is the number of filled seeds divided by the total number of seeds and multiplied by 100), increase in thousand kernel weight, among others.

[0136] The present invention provides a method for increasing yield, especially seed yield of plants, relative to control plants, which method comprises modulating expression, preferably increasing expression, in a plant of a nucleic acid encoding a VPE as defined herein.

[0137] Since the transgenic plants according to the present invention have increased yield, it is likely that these plants exhibit an increased growth rate (during at least part of their life cycle), relative to the growth rate of control plants at a corresponding stage in their life cycle.

[0138] The increased growth rate may be specific to one or more parts of a plant (including seeds), or may be throughout substantially the whole plant. Plants having an increased growth rate may have a shorter life cycle. The life cycle of a plant may be taken to mean the time needed to grow from a dry mature seed up to the stage where the plant has produced dry mature seeds, similar to the starting material. This life cycle may be influenced by factors such as early vigour, growth rate, greenness index, flowering time and speed of seed maturation. The increase in growth rate may take place at one or more stages in the life cycle of a plant or during substantially the whole plant life cycle. Increased growth rate during the early stages in the life cycle of a plant may reflect enhanced vigour. The increase in growth rate may alter the harvest cycle of a plant allowing plants to be sown later and/or harvested sooner than would otherwise be possible (a similar effect may be obtained with earlier flowering time). If the growth rate is sufficiently increased, it may allow for the further sowing of seeds of the same plant species (for example sowing and harvesting of rice plants followed by sowing and harvesting of further rice plants all within one conventional growing period). Similarly, if the growth rate is sufficiently increased, it may allow for the further sowing of seeds of different plants species (for example the sowing and harvesting of corn plants followed by, for example, the sowing and optional harvesting of soybean, potato or any other suitable plant). Harvesting additional times from the same rootstock in the case of some crop plants may also be possible. Altering the harvest cycle of a plant may lead to an increase in annual biomass production per acre (due to an increase in the number of times (say in a year) that any particular plant may be grown and harvested). An increase in growth rate may also allow for the cultivation of transgenic plants in a wider geographical area than their wild-type counterparts, since the territorial limitations for growing a crop are often determined by adverse environmental conditions either at the time of planting (early season) or at the time of harvesting (late season). Such adverse conditions may be avoided if the harvest cycle is shortened. The growth rate may be determined by deriving various parameters from growth curves, such parameters may be: T-Mid (the time taken for plants to reach 50% of their maximal size) and T-90 (time taken for plants to reach 90% of their maximal size), amongst others.

[0139] According to a preferred feature of the present invention, performance of the methods of the invention gives plants having an increased growth rate relative to control plants. Therefore, according to the present invention, there is provided a method for increasing the growth rate of plants, which method comprises modulating expression, preferably increasing expression, in a plant of a nucleic acid encoding a VPE as defined herein.

[0140] An increase in yield and/or growth rate occurs whether the plant is under non-stress conditions or whether the plant is exposed to various stresses compared to control plants. Plants typically respond to exposure to stress by growing more slowly. In conditions of severe stress, the plant may even stop growing altogether. Mild stress on the other hand is defined herein as being any stress to which a plant is exposed which does not result in the plant ceasing to grow altogether without the capacity to resume growth. Mild stress in the sense of the invention leads to a reduction in the growth of the stressed plants of less than 40%, 35% or 30%, preferably less than 25%, 20% or 15%, more preferably less than 14%, 13%, 12%, 11% or 10% or less in comparison to the control plant under non-stress conditions. Due to advances in agricultural practices (irrigation, fertilization, pesticide treatments) severe stresses are not often encountered in cultivated crop plants. As a consequence, the compromised growth induced by mild stress is often an undesirable feature for agriculture. Mild stresses are the everyday biotic and/or abiotic (environmental) stresses to which a plant is exposed. Abiotic stresses may be due to drought or excess water, anaerobic stress, salt stress, chemical toxicity, oxidative stress and hot, cold or freezing temperatures. The abiotic stress may be an osmotic stress caused by a water stress (particularly due to drought), salt stress, oxidative stress or an ionic stress. Biotic stresses are typically those stresses caused by pathogens, such as bacteria, viruses, fungi and insects.

[0141] In particular, the methods of the present invention may be performed under non-stress conditions or under conditions of mild drought to give plants having increased yield relative to control plants. As reported in Wang et al. (Planta (2003) 218: 1-14), abiotic stress leads to a series of morphological, physiological, biochemical and molecular changes that adversely affect plant growth and productivity. Drought, salinity, extreme temperatures and oxidative stress are known to be interconnected and may induce growth and cellular damage through similar mechanisms. Rabbani et al. (Plant Physiol (2003) 133: 1755-1767) describes a particularly high degree of “cross talk” between drought stress and high-salinity stress. For example, drought and/or salinisation are manifested primarily as osmotic stress, resulting in the disruption of homeostasis and ion distribution in the cell. Oxidative stress, which frequently accompanies high or low temperature, salinity or drought stress, may cause denaturing of functional and structural proteins. As a consequence, these diverse environmental stresses often activate similar cell signaling pathways and cellular responses, such as the production of stress proteins, up-regulation of anti-oxidants, accumulation of compatible solutes and growth arrest. The term “non-stress” conditions as used herein are those environmental conditions that allow optimal growth of plants. Persons skilled in the art are aware of normal soil conditions and climatic conditions for a given location.

[0142] Performance of the methods of the invention gives plants grown under non-stress conditions or under mild drought conditions increased yield relative to suitable control plants grown under comparable conditions. Therefore, according to the present invention, there is provided a method for increasing yield in plants grown under non-stress conditions or under mild drought conditions, which method comprises increasing expression in a plant of a nucleic acid encoding a VPE.

[0143] The present invention encompasses plants or parts thereof (including seeds) obtainable by the methods according to the present invention. The plants or parts thereof comprise a nucleic acid transgene encoding a VPE as defined above.

[0144] The invention also provides genetic constructs and vectors to facilitate introduction and/or expression in plants of nucleic acids encoding VPEs. The gene constructs may be inserted into vectors, which may be commercially available, suitable for transforming into plants and suitable for expression of the gene of interest in the transformed cells. The invention also provides use of a gene construct as defined herein in the methods of the invention.

[0145] More specifically, the present invention provides a construct comprising:
[0146] (a) a nucleic acid encoding a VPE as defined above;
[0147] (b) one or more control sequences capable of driving expression of the nucleic acid sequence of (a); and optionally
[0148] (c) a transcription termination sequence.

[0149] The term “control sequence” and “termination sequence” are as defined herein.

[0150] Plants are transformed with a vector comprising any of the nucleic acids described above. The skilled artisan is well aware of the genetic elements that must be present on the vector in order to successfully transform, select and propagate host cells containing the sequence of interest. The sequence of interest is operably linked to one or more control sequences (at least to a promoter).

[0151] Advantageously, any type of promoter may be used to drive expression of the nucleic acid sequence. A constitutive promoter is particularly useful as is a root-specific promoter. However, particularly preferred is a seed-specific promoter. A seed-specific promoter is transcriptionally active predominantly in seed tissue, but not necessarily exclusively in seed tissue (in cases of leaky expression). The seed-specific promoter may be active during seed development and/or during germination. Seed-specific promoters are well known in the art. It should be clear that the applicability of the present invention is not restricted to the VPE-encoding nucleic acid represented by SEQ ID NO: 149, nor is the applicability of the invention restricted to expression of a VPE-encoding nucleic acid when driven by a seed-specific promoter. Examples of other seed-specific promoters which may also be used to drive expression of a VPE-encoding nucleic acid are shown in the “Definitions” section herein. Further examples of seed-specific promoters are given in Qing Qu and Takaiwa (Plant Biotechnol. J. 2, 113-125, 2004), which disclosure is incorporated by reference herein as if fully set forth.

[0152] More preferably a promoter that is transcriptionally active in the embryo and/or alerone layers of a seed. Preferably, the seed-specific promoter is a Water-Stress Inducible (WSI) promoter or a functionally equivalent promoter. More preferably, the promoter sequence is as represented by SEQ ID NO: 205. Examples of other embryo-specific promoters which may also be used to drive expression of a VPE-encoding nucleic acid are shown in the “Definitions” section herein. Examples of other alerone-specific promoters which may also be used to drive expression of a VPE-encoding nucleic acid are also shown in the “Definitions” section herein.

[0153] For the identification of functionally equivalent promoters, the promoter strength and/or expression pattern of a candidate promoter may be analysed for example by operably linking the promoter to a reporter gene and assaying the expression level and pattern of the reporter gene in various tissues of the plant. Suitable well-known reporter genes include for example beta-glucuronidase or beta galactosidase. The promoter activity is assayed by measuring the enzymatic activity of the beta-glucuronidase or beta-galactosidase. The promoter strength and/or expression pattern may then be compared to that of a reference promoter (such as the one used in the methods of the present invention). Alternatively, promoter strength may be assayed by quantifying mRNA levels or by comparing mRNA levels of the nucleic acid used in the methods of the present invention, with mRNA levels of housekeeping genes such as 18S rRNA, using methods known in the art, such as Northern blotting with densitometric analysis of autoradiograms, quantitative real-time PCR or RT-PCR (Heid et al., 1996 Genome Methods 6: 986-994). Generally by “weak promoter” is intended a promoter that drives expression of a coding sequence at a low level. By “low level” is intended at levels of about 1/10,000 transcripts to about 1/100,000 transcripts, to about 1/500,0000 transcripts per cell. Conversely, a “strong promoter” drives expression of a coding sequence at high level, or at about 1/10 transcripts to about 1/100 transcripts to about 1/1,000 transcripts per cell.

[0154] Optionally, one or more terminator sequences may be used in the construct introduced into a plant. Additional regulatory elements may include transcriptional as well as translational enhancers. Those skilled in the art will be aware of terminator and enhancer sequences that may be suitable for use in performing the invention. Such sequences would be known or may readily be obtained by a person skilled in the art.

[0155] An intron sequence may also be added to the 5′ untranslated region (UTR) or in the coding sequence to increase the amount of the mature message that accumulates in the cytosol. Inclusion of a spliceable intron in the transcription unit in both plant and animal expression constructs has been shown to increase gene expression at both the mRNA and protein levels up to 1000-fold (Buchman and Berg, Mol. Cell Biol. 8:4395-4405 (1988); Callis et al., Genes Dev. 1:1183-1200 (1987)). Such intron enhancement of gene expression is typically greatest when placed near the 5′ end of the transcription unit. Use of the maize introns Adh1-S intron 1, 2, and 6, the Bronze-1 intron are known in the art. For general information, see The Maize Handbook, Chapter 116, Freeling and Walbot, Eds., Springer, N.Y. (1994).

[0156] Other control sequences (besides promoter, enhancer, silencer, intron sequences, 3′UTR and/or 5′UTR regions) may be protein and/or RNA stabilizing elements. Such sequences would be known or may readily be obtained by a person skilled in the art.

[0157] The genetic constructs of the invention may further include an origin of replication sequence that is required for maintenance and/or replication in a specific cell type. One example is when a genetic construct is required to be maintained in a bacterial cell as an episomal genetic element (e.g. plasmid or cosmid molecule). Preferred origins of replication include, but are not limited to, the f1-ori and colE1.

[0158] For the detection of the successful transfer of the nucleic acid sequences as used in the methods of the invention and/or selection of transgenic plants comprising these nucleic acids, it is advantageous to use marker genes (or reporter genes). Therefore, the genetic construct may optionally comprise a selectable marker gene. Selectable markers are described in more detail in the “definitions” section herein.

[0159] It is known that upon stable or transient integration of nucleic acids into plant cells, only a minority of the cells takes up the foreign DNA and, if desired, integrates it into its genome, depending on the expression vector used and the transfection technique used. To identify and select these integrants, a gene coding for a selectable marker (such as the ones described above) is usually introduced into the host cells together with the gene of interest. These markers can for example be used in mutants in which these genes are not functional by, for example, deletion by conventional methods. Furthermore, nucleic acid molecules encoding a selectable marker can be introduced into a host cell on the same vector that comprises the sequence encoding the polypeptides of the invention or used in the methods of the invention, or else in a separate vector. Cells which have been stably transfected with the introduced nucleic acid can be identified for example by selection (for example, cells which have integrated the selectable marker survive whereas the other cells die).

[0160] Since the marker genes, particularly genes for resistance to antibiotics and herbicides, are no longer required or are undesired in the transgenic host cell once the nucleic acids have been introduced successfully, the process according to the invention for introducing the nucleic acids advantageously employs techniques which enable the removal or excision of these marker genes. One such a method is what is known as co-transformation. The co-transformation method employs two vectors simultaneously for the transformation, one vector bearing the nucleic acid according to the invention and a second bearing the marker gene(s). A large proportion of transformants receives or, in the case of plants, comprises (up to 40% or more of the transformants), both vectors. In case of transformation with Agrobacteria, the transformants usually receive only a part of the vector, i.e. the sequence flanked by the T-DNA, which usually represents the expression cassette. The marker genes can subsequently be removed from the transformed plant by performing crosses. In another method, marker genes integrated into a transposon are used for the transformation together with desired nucleic acid (known as the Ac/Ds technology). The transformants can be crossed with a transposase source or the transformants are transformed with a nucleic acid construct conferring expression of a transposase, transiently or stable. In some cases (approx. 10%), the transposon jumps out of the genome of the host cell once transformation has taken place successfully and is lost. In a further number of cases, the transposon jumps to a different location. In these cases the marker gene must be eliminated by performing crosses. In microbiology, techniques were developed which make possible, or facilitate, the detection of such events. A further advantageous method relies on what is known as recombination systems; whose advantage is that elimination by crossing can be dispensed with. The best-known system of this type is what is known as the Cre/lox system. Cre1 is a recombinase that removes the sequences located between the loxP sequences. If the marker gene is integrated between the loxP sequences, it is removed once transformation has taken place successfully, by expression of the recombinase. Further recombination systems are the HIN/HIX, FLP/FRT and REP/STB system (Tribble et al., J. Biol. Chem., 275, 2000: 22255-22267; Velmurugan et al., J. Cell Biol., 149, 2000: 553-566). A site-specific integration into the plant genome of the nucleic acid sequences according to the invention is possible. Naturally, these methods can also be applied to microorganisms such as yeast, fungi or bacteria.

[0161] The invention also provides a method for the production of transgenic plants having enhanced yield-related traits relative to control plants, comprising introduction and expression in a plant of any nucleic acid encoding a VPE as defined hereinabove.

[0162] More specifically, the present invention provides a method for the production of transgenic plants having increased yield, which method comprises:
[0163] (i) introducing and expressing in a plant or plant cell a VPE-encoding nucleic acid; and
[0164] (ii) cultivating the plant cell under conditions promoting plant growth and development.

[0165] The nucleic acid may be introduced directly into a plant cell or into the plant itself (including introduction into a tissue, organ or any other part of a plant). According to a preferred feature of the present invention, the nucleic acid is preferably introduced into a plant by transformation. The term “transformation” is described in more detail in the “definitions” section herein.

[0166] The genetically modified plant cells can be regenerated via all methods with which the skilled worker is familiar. Suitable methods can be found in the abovementioned publications by S. D. Kung and R. Wu, Potrykus or Höfgen and Willmitzer.

[0167] Generally after transformation, plant cells or cell groupings are selected for the presence of one or more markers which are encoded by plant-expressible genes co-transferred with the gene of interest, following which the transformed material is regenerated into a whole plant. To select transformed plants, the plant material obtained in the transformation is, as a rule, subjected to selective conditions so that transformed plants can be distinguished from untransformed plants. For example, the seeds obtained in the above-described manner can be planted and, after an initial growing period, subjected to a suitable selection by spraying. A further possibility consists in growing the seeds, if appropriate after sterilization, on agar plates using a suitable selection agent so that only the transformed seeds can grow into plants. Alternatively, the transformed plants are screened for the presence of a selectable marker such as the ones described above.

[0168] Following DNA transfer and regeneration, putatively transformed plants may also be evaluated, for instance using Southern analysis, for the presence of the gene of interest, copy number and/or genomic organisation. Alternatively or additionally, expression levels of the newly introduced DNA may be monitored using Northern and/or Western analysis, both techniques being well known to persons having ordinary skill in the art.

[0169] The generated transformed plants may be propagated by a variety of means, such as by clonal propagation or classical breeding techniques. For example, a first generation (or T1) transformed plant may be selfed and homozygous second-generation (or T2) transformants selected, and the T2 plants may then further be propagated through classical breeding techniques.

[0170] The generated transformed organisms may take a variety of forms. For example, they may be chimeras of transformed cells and non-transformed cells; clonal transformants (e.g., all cells transformed to contain the expression cassette); grafts of transformed and untransformed tissues (e.g., in plants, a transformed rootstock grafted to an untransformed scion).

[0171] The present invention clearly extends to any plant cell or plant produced by any of the methods described herein, and to all plant parts and propagules thereof. The present invention extends further to encompass the progeny of a primary transformed or transfected cell, tissue, organ or whole plant that has been produced by any of the aforementioned methods, the only requirement being that progeny exhibit the same genotypic and/or phenotypic characteristic(s) as those produced by the parent in the methods according to the invention.

[0172] The invention also includes host cells containing an isolated nucleic acid encoding a VPE as defined hereinabove. Preferred host cells according to the invention are plant cells. Host plants for the nucleic acids or the vector used in the method according to the invention, the expression cassette or construct or vector are, in principle, advantageously all plants, which are capable of synthesizing the polypeptides used in the inventive method.

[0173] The methods of the invention are advantageously applicable to any plant.

[0174] Plants that are particularly useful in the methods of the invention include all plants which belong to the superfamily Viridiplantae, in particular monocotyledonous and dicotyledonous plants including fodder or forage legumes, ornamental plants, food crops, trees or shrubs. According to a preferred embodiment of the present invention, the plant is a crop plant. Examples of crop plants include soybean, sunflower, canola, alfalfa, rapeseed, cotton, tomato, potato and tobacco. Further preferably, the plant is a monocotyledonous plant. Examples of monocotyledonous plants include sugarcane. More preferably the plant is a cereal. Examples of cereals include rice, maize, wheat, barley, millet, rye, sorghum and oats.

[0175] The invention also extends to harvestable parts of a plant such as, but not limited to seeds, leaves, fruits, flowers, stems, rhizomes, tubers and bulbs. The invention furthermore relates to products derived, preferably directly derived, from a harvestable part of such a plant, such as dry pellets or powders, oil, fat and fatty acids, starch or proteins.

[0176] According to a preferred feature of the invention, the modulated expression is increased expression. Methods for increasing expression of nucleic acids or genes, or gene products, are well documented in the art and include, for example, overexpression driven by appropriate promoters, the use of transcription enhancers or translation enhancers. Isolated nucleic acids which serve as promoter or enhancer elements may be introduced in an appropriate position (typically upstream) of a non-heterologous form of a polynucleotide so as to upregulate expression. For example, endogenous promoters may be altered in vivo by mutation, deletion, and/or substitution (see, Kmiec, U.S. Pat. No. 5,565,350; Zarling et al., PCT/US93/03868), or isolated promoters may be introduced into a plant cell in the proper orientation and distance from a gene of the present invention so as to control the expression of the gene.

[0177] If polypeptide expression is desired, it is generally desirable to include a polyadenylation region at the 3′-end of a polynucleotide coding region. The polyadenylation region can be derived from the natural gene, from a variety of other plant genes, or from T-DNA. The 3′ end sequence to be added may be derived from, for example, the nopaline synthase or octopine synthase genes, or alternatively from another plant gene, or less preferably from any other eukaryotic gene.

[0178] As mentioned above, a preferred method for modulating (preferably, increasing) expression of a nucleic acid encoding a VPE is by introducing and expressing in a plant a nucleic acid encoding a VPE; however the effects of performing the method, i.e. enhancing yield-related traits may also be achieved using other well known techniques. A description of some of these techniques will now follow.

[0179] One such technique is T-DNA activation tagging (Hayashi et al. Science (1992) 1350-1353), which involves insertion of T-DNA, usually containing a promoter (may also be a translation enhancer or an intron), in the genomic region of the gene of interest or 10 kb up- or downstream of the coding region of a gene in a configuration such that the promoter directs expression of the targeted gene. Typically, regulation of expression of the targeted gene by its natural promoter is disrupted and the gene falls under the control of the newly introduced promoter. The promoter is typically embedded in a T-DNA. This T-DNA is randomly inserted into the plant genome, for example, through Agrobacterium infection and leads to modified expression of genes near the inserted T-DNA. The resulting transgenic plants show dominant phenotypes due to modified expression of genes close to the introduced promoter.

[0180] The effects of the invention may also be reproduced using the technique of TILLING (Targeted Induced Local Lesions In Genomes); for a description of the same see the “definitions” section.

[0181] The effects of the invention may also be reproduced using homologous recombination; for a description of the same see the “definitions” section.

[0182] The present invention also encompasses use of nucleic acids encoding VPEs as described herein and use of these VPEs in enhancing any of the aforementioned yield-related traits in plants.

[0183] Nucleic acids encoding VPEs described herein, or the VPEs themselves, may find use in breeding programmes in which a DNA marker is identified which may be genetically linked to a VPE-encoding gene. The nucleic acids/genes, or the VPE proteins themselves may be used to define a molecular marker. This DNA or protein marker may then be used in breeding programmes to select plants having enhanced yield-related traits as defined hereinabove in the methods of the invention.

[0184] Allelic variants of a VPE protein-encoding nucleic acid/gene may also find use in marker-assisted breeding programmes. Such breeding programmes sometimes require introduction of allelic variation by mutagenic treatment of the plants, using for example EMS mutagenesis; alternatively, the programme may start with a collection of allelic variants of so called “natural” origin caused unintentionally. Identification of allelic variants then takes place, for example, by PCR. This is followed by a step for selection of superior allelic variants of the sequence in question and which give increased yield. Selection is typically carried out by monitoring growth performance of plants containing different allelic variants of the sequence in question. Growth performance may be monitored in a greenhouse or in the field. Further optional steps include crossing plants in which the superior allelic variant was identified with another plant. This could be used, for example, to make a combination of interesting phenotypic features.

[0185] Nucleic acids encoding VPEs may also be used as probes for genetically and physically mapping the genes that they are a part of, and as markers for traits linked to those genes. Such information may be useful in plant breeding in order to develop lines with desired phenotypes. Such use of VPE-encoding nucleic acids requires only a nucleic acid sequence of at least 15 nucleotides in length. The VPE-encoding nucleic acids may be used as restriction fragment length polymorphism (RFLP) markers. Southern blots (Sambrook J, Fritsch E F and Maniatis T (1989) Molecular Cloning, A Laboratory Manual) of restriction-digested plant genomic DNA may be probed with the VPE-encoding nucleic acids. The resulting banding patterns may then be subjected to genetic analyses using computer programs such as MapMaker (Lander et al. (1987) Genomics 1: 174-181) in order to construct a genetic map. In addition, the nucleic acids may be used to probe Southern blots containing restriction endonuclease-treated genomic DNAs of a set of individuals representing parent and progeny of a defined genetic cross. Segregation of the DNA polymorphisms is noted and used to calculate the position of the VPE-encoding nucleic acid in the genetic map previously obtained using this population (Botstein et al. (1980) Am. J. Hum. Genet. 32:314-331).

[0186] The production and use of plant gene-derived probes for use in genetic mapping is described in Bernatzky and Tanksley (1986) Plant Mol. Biol. Reporter 4: 37-41. Numerous publications describe genetic mapping of specific cDNA clones using the methodology outlined above or variations thereof. For example, F2 intercross populations, backcross populations, randomly mated populations, near isogenic lines, and other sets of individuals may be used for mapping. Such methodologies are well known to those skilled in the art.

[0187] The nucleic acid probes may also be used for physical mapping (i.e., placement of sequences on physical maps; see Hoheisel et al. In: Non-mammalian Genomic Analysis: A Practical Guide, Academic press 1996, pp. 319-346, and references cited therein).

[0188] In another embodiment, the nucleic acid probes may be used in direct fluorescence in situ hybridisation (FISH) mapping (Trask (1991) Trends Genet. 7:149-154). Although current methods of FISH mapping favour use of large clones (several kb to several hundred kb; see Laan et al. (1995) Genome Res. 5:13-20), improvements in sensitivity may allow performance of FISH mapping using shorter probes.

[0189] A variety of nucleic acid amplification-based methods for genetic and physical mapping may be carried out using the nucleic acids. Examples include allele-specific amplification (Kazazian (1989) J. Lab. Clin. Med 11:95-96), polymorphism of PCR-amplified fragments (CAPS; Sheffield et al. (1993) Genomics 16:325-332), allele-specific ligation (Landegren et al. (1988) Science 241:1077-1080), nucleotide extension reactions (Sokolov (1990) Nucleic Acid Res. 18:3671), Radiation Hybrid Mapping (Walter et al. (1997) Nat. Genet. 7:22-28) and Happy Mapping (Dear and Cook (1989) Nucleic Acid Res. 17:6795-6807). For these methods, the sequence of a nucleic acid is used to design and produce primer pairs for use in the amplification reaction or in primer extension reactions. The design of such primers is well known to those skilled in the art. In methods employing PCR-based genetic mapping, it may be necessary to identify DNA sequence differences between the parents of the mapping cross in the region corresponding to the instant nucleic acid sequence. This, however, is generally not necessary for mapping methods.

[0190] The methods according to the present invention result in plants having enhanced yield-related traits, as described hereinbefore. These traits may also be combined with other economically advantageous traits, such as further yield-enhancing traits, tolerance to other abiotic and biotic stresses, traits modifying various architectural features and/or biochemical and/or physiological features.

### (ii) CCA1

[0191] Surprisingly, it has now been found that modulating expression in a plant of a nucleic acid encoding a CCA1-like polypeptide gives plants having enhanced yield-related traits relative to control plants, in particular increased seed yield. The particular class of CCA1-like polypeptides suitable for enhancing yield-related traits in plants is described in detail below.

[0192] The present invention provides a method for enhancing yield-related traits, in particular seed yield, in plants relative to control plants, comprising modulating expression in a plant of a nucleic acid encoding a CCA1-like polypeptide.

[0193] Any reference hereinafter to a “protein useful in the methods of the invention” is taken to mean a CCA1-like polypeptide as defined herein. Any reference hereinafter to a “nucleic acid useful in the methods of the invention” is taken to mean a nucleic acid capable of encoding such a CCA1-like polypeptide.

[0194] The terms “polypeptide” and “protein” are as defined in the Definitions section herein. The terms “polynucleotide(s)”, “nucleic acid sequence(s)”, “nucleotide sequence(s)” are also as defined herein. The term “Control plant” is also defined hereinabove.

[0195] A preferred method for modulating (preferably, increasing) expression of a nucleic acid encoding a protein useful in the methods of the invention is by introducing and expressing in a plant a nucleic acid encoding a protein useful in the methods of the invention as defined below.

[0196] The nucleic acid to be introduced into a plant (and therefore useful in performing the methods of the invention) is any nucleic acid encoding the type of protein which will now be described, hereafter also named “CCA1-like nucleic acid” or “CCA1-like gene”. A “CCA1-like” polypeptide as defined herein refers to any MYB transcription factor of the SHAQKYF class. MYB transcription factors are well known in the art, a recent overview of MYB transcription factors in rice and Arabidopsis thaliana is given in Yanhui et al. (Plant Mol. Biol 60, 107-124, 2006), which disclosure is incorporated herein by reference. Transcription factors regulate gene expression and comprise at least a DNA binding domain and an activation/repression domain. The MYB DNA binding domain is usually composed of one to three imperfect repeats, each with about 52 amino acids that adopt a helix-turn-helix conformation that intercalates in the major groove of the DNA. Each MYB repeat comprises three regularly spaced tryptophan residues that participate in a hydrophobic cluster and that are postulated to be involved in the specific recognition of DNA.

[0197] CCA1-like proteins as defined herein comprise a SANT domain (defined in SMART as SM00717, InterPro IPR001005, see FIG. 1), which is involved in the recognition of a specific DNA motif, the YAAC(G/T)G sequence (wherein Y symbolises C or T).

[0198] The SANT domain preferably comprises motif 1 and/or motif 2:

Motif 1, SEQ ID NO: 141:
W(T/S)(E/D/A/P/T/R)(G/E/P/Q/D/A/N/Y)E(H/Q)(D/E/N/
R/K/Q/A/S)(K/R/L/M/T/N/Q)F(L/I/V/M)(E/D/Q/I/L/V/M/
T/A/R/H)(A/S/G)(L/I/M)(Q/H/I/K/R/S/E/D/N)(L/M/K/R/
Q/V/T)(F/Y/H/V/L/F)(D/G)(R/K/E)

[0199] Preferably, motif 1 has the sequence

W(T/S)(E/D/A)(G/E/P/Q/D/A)EH(D/E/N/R/K/Q/A)(K/R/
L)F(L/I/V)(E/D/Q/I)(A/S)(L/I)(Q/H/I/K/R)(L/M/K)(F/
Y/H)(D/G)R

[0200] More preferably, motif 1 has the sequence

WT(E/D)(E/P/Q/D)EH(D/N/K/Q)(K/R)F(L/I)(E/D/Q)AL(Q/
H/I/K/R)L(F/Y/H)(D/G)R

[0201] Most preferably motif 1 has the sequence

WTEEEHNRFIEALRLYGR

Motif 2, SEQ ID NO: 142
(F/H/Y/C/L)(V/I)(G/A/K/T/V/S/R)(S/T)(K/R)(T/N/S)
(V/T/A/P/S)(I/V/T/M/R/E/A)Q(I/V)(R/A/S)(S/M)(H/Y)
(A/Y)(Q/D)(K/Y/N)(Y/H/F)(F/K/C)(L/T/S/A/I/R/H)

[0202] Preferably, motif 2 has the sequence

(F/H/Y)(V/I)(G/A)(S/T)K(T/N/S)(V/T/A)(I/V)QIRSHAQK
(Y/H/F)F(L/T/S/A)

[0203] Most preferably motif 2 has the sequence

HVATKTAVQIRSHAQKFFS

[0204] Preferably, the CCA1-like protein useful in the methods of the present invention also comprises motif 3 and/or motif 4:

| | |
|---|---|
| Motif 3, SEQ ID NO: 143: | PP(P/Q)(R/Y/L)(P/H)(K/R/P) |
| Motif 4, SEQ ID NO: 144: | ATVAAA(S/T)AWWA |

[0205] Further preferably, the CCA1-like protein useful in the methods of the present invention also comprises motif 5, SEQ ID NO: 145: DRSS(C/S)GSNT

[0206] A person skilled in the art could readily determine whether an amino acid sequence in question falls within the definition of a “CCA1-like” polypeptide using known techniques and software for the making of a phylogenetic tree, such as a GCG, EBI or CLUSTAL package, using default parameters. A preferred method for constructing a phylogenetic tree is the method described by Yanhui et al. (2006). Any sequence clustering within the CCA1-like subfamily as defined by Yanhui et al. would be considered to fall within the aforementioned definition of a CCA1-like polypeptide, and would be considered suitable for use in the methods of the invention.

[0207] Examples of proteins useful in the methods of the invention and nucleic acids encoding the same are as given below in table A of Example 1.

[0208] Also useful in the methods of the invention are homologues of any one of the amino acid sequences given in table A of Example 1. “Homologues” are as defined in the Definitions section hereinabove.

[0209] Also useful in the methods of the invention are derivatives of any one of the polypeptides given in table A of Example 1 or orthologues or paralogues of any of the aforementioned SEQ ID NOs. The term “derivatives” being as defined herein. Particularly preferred are derivatives of SEQ ID NO: 2 or derivatives of the polypeptides given in table A of Example 1. Derivatives useful in the methods of the present invention preferably have similar biological and functional activity as the unmodified protein from which they are derived.

[0210] The invention is illustrated by transforming plants with the Arabidopsis thaliana nucleic acid sequence represented by SEQ ID NO: 1, encoding the polypeptide sequence of SEQ ID NO: 2, however performance of the invention is not restricted to these sequences. The methods of the invention may advantageously be performed using any nucleic acid encoding a protein useful in the methods of the invention as defined herein, including orthologues and paralogues, such as any of the nucleic acid sequences given in table A of Example 1.

[0211] The amino acid sequences given in table A of Example 1 may be considered to be orthologues and paralogues of the CCA1-like polypeptide represented by SEQ ID NO: 2, orthologues and paralogues being as defined herein.

[0212] Orthologues and paralogues may easily be found by performing a so-called reciprocal blast search. Typically, this involves a first BLAST involving BLASTing a query sequence (for example using any of the sequences listed in table A of Example 1) against any sequence database, such as the publicly available NCBI database. BLASTN or TBLASTX (using standard default values) are generally used when starting from a nucleotide sequence, and BLASTP or TBLASTN (using standard default values) when starting from a protein sequence. The BLAST results may optionally be filtered. The full-length sequences of either the filtered results or non-filtered results are then BLASTed back (second BLAST) against sequences from the organism from which the query sequence is derived (where the query sequence is SEQ ID NO: 1 or SEQ ID NO: 2, the second BLAST would therefore be against Arabidopsis thaliana sequences). The results of the first and second BLASTs are then compared. A paralogue is identified if a high-ranking hit from the first blast is from the same species as from which the query sequence is derived, a BLAST back then ideally results in the query sequence as highest hit; an orthologue is identified if a high-ranking hit in the first BLAST is not from the same species as from which the query sequence is derived, and preferably results upon BLAST back in the query sequence being among the highest hits.

[0213] High-ranking hits are those having a low E-value. The lower the E-value, the more significant the score (or in other words the lower the chance that the hit was found by chance). Computation of the E-value is well known in the art. In addition to E-values, comparisons are also scored by percentage identity. Percentage identity refers to the number of identical nucleotides (or amino acids) between the two compared nucleic acid (or polypeptide) sequences over a particular length. In the case of large families, ClustalW may be used, followed by a neighbour joining tree, to help visualize clustering of related genes and to identify orthologues and paralogues.

[0214] Table A of Example 1 gives examples of orthologues and paralogues of the CCA1-like protein represented by SEQ ID NO 2. Further orthologues and paralogues may readily be identified using the BLAST procedure described above.

[0215] The proteins of the invention are identifiable by the presence of the conserved SANT domain and one or more of the motifs 3 to 5 (shown in FIG. 1). The term “domain” refers to a set of amino acids conserved at specific positions along an alignment of sequences of evolutionarily related proteins. While amino acids at other positions can vary between homologues, amino acids that are highly conserved at specific positions indicate amino acids that are essential in the structure, stability or activity of a protein. Identified by their high degree of conservation in aligned sequences of a family of protein homologues, they can be used as identifiers to determine if any polypeptide in question belongs to a previously identified polypeptide family (in this case, the proteins useful in the methods of the invention and nucleic acids encoding the same as defined herein).

[0216] The term “motif”, “consensus sequence” and “signature” are as defined herein. The term “domain” is also defined herein.

[0217] Specialist databases also exist for the identification of domains, for example, SMART (Schultz et al. (1998) Proc. Natl. Acad. Sci. USA 95, 5857-5864; Letunic et al. (2002) Nucleic Acids Res 30, 242-244, InterPro (Mulder et al., (2003) Nucl. Acids. Res. 31, 315-318, Prosite (Bucher and Bairoch (1994), A generalized profile syntax for biomolecular sequences motifs and its function in automatic sequence interpretation. (In) ISMB-94; Proceedings 2nd International Conference on Intelligent Systems for Molecular Biology. Altman R., Brutlag D., Karp P., Lathrop R., Searls D., Eds., pp 53-61, AAAIPress, Menlo Park; Hulo et al., Nucl. Acids. Res. 32:D134-D137, (2004), or Pfam (Bateman et al., Nucleic Acids Research 30(1): 276-280 (2002). A set of tools for in silico analysis of protein sequences is available on the ExPASY proteomics server (hosted by the Swiss Institute of Bioinformatics (Gasteiger et al., ExPASy: the proteomics server for in-depth protein knowledge and analysis, Nucleic Acids Res. 31:3784-3788 (2003)).

[0218] Domains may also be identified using routine techniques, such as by sequence alignment. Methods for the alignment of sequences for comparison are well known in the art, such methods include GAP, BESTFIT, BLAST, FASTA and TFASTA. GAP uses the algorithm of Needleman and Wunsch ((1970) J Mol Biol 48: 443-453) to find the global (i.e. spanning the complete sequences) alignment of two sequences that maximizes the number of matches and minimizes the number of gaps. The BLAST algorithm (Altschul et al. (1990) J Mol Biol 215: 403-10) calculates percent sequence identity and performs a statistical analysis of the similarity between the two sequences. The software for performing BLAST analysis is publicly available through the National Centre for Biotechnology Information (NCBI). Homologues may readily be identified using, for example, the ClustalW multiple sequence alignment algorithm (version 1.83), with the default pairwise alignment parameters, and a scoring method in percentage. Global percentages of similarity and identity may also be determined using one of the methods available in the MatGAT software package (Campanella et al., BMC Bioinformatics. 2003 Jul. 10; 4:29. MatGAT: an application that generates similarity/identity matrices using protein or DNA sequences.). Minor manual editing may be performed to optimise alignment between conserved motifs, as would be apparent to a person skilled in the art. Furthermore, instead of using full-length sequences for the identification of homologues, specific domains (such as the SANT domain, or one of the motifs defined above) may be used as well. The sequence identity values, which are indicated below in Example 3 as a percentage were determined over the entire nucleic acid or amino acid sequence, and/or over selected domains or conserved motif(s), using the programs mentioned above using the default parameters.

[0219] Furthermore, CCA1-like proteins (at least in their native form) typically have DNA binding activity. A person skilled in the art may easily determine the presence of DNA binding activity or transcriptional activation using routine tools and techniques. To determine the DNA binding activity of CCA1-like proteins, several assays are available (for example Current Protocols in Molecular Biology, Volumes 1 and 2, Ausubel et al. (1994), Current Protocols). In particular, a DNA binding assay for CCA1-like transcription factors using the A2 fragment of the Lhcb1*3 gene is described in Wang et al. (Plant Cell 9, 497-507, 1197). Further details are provided in Example 6.

[0220] Nucleic acids encoding proteins useful in the methods of the invention need not be full-length nucleic acids, since performance of the methods of the invention does not rely on the use of full-length nucleic acid sequences. Examples of nucleic acids suitable for use in performing the methods of the invention include the nucleic acid sequences given in table A of Example 1, but are not limited to those sequences. Nucleic acid variants may also be useful in practising the methods of the invention. Examples of such nucleic acid variants include portions of nucleic acids encoding a protein useful in the methods of the invention, nucleic acids hybridising to nucleic acids encoding a protein useful in the methods of the invention, splice variants of nucleic acids encoding a protein useful in the methods of the invention, allelic variants of nucleic acids encoding a protein useful in the methods of the invention and variants of nucleic acids encoding a protein useful in the methods of the invention that are obtained by gene shuffling. The terms portion, hybridising sequence, splice variant, allelic variant and gene shuffling will now be described.

[0221] According to the present invention, there is provided a method for enhancing yield-related traits in plants, comprising introducing and expressing in a plant a portion of any one of the nucleic acid sequences given in table A of Example 1, or a portion of a nucleic acid encoding an orthologue, paralogue or homologue of any of the amino acid sequences given in table A of Example 1.

[0222] Portions useful in the methods of the invention, encode a polypeptide falling within the definition of a nucleic acid encoding a protein useful in the methods of the invention as defined herein and having substantially the same biological activity as the amino acid sequences given in table A of Example 1. Preferably, the portion is a portion of any one of the nucleic acids given in table A of Example 1. The portion is typically at least 1200 consecutive nucleotides in length, preferably at least 1400 consecutive nucleotides in length, more preferably at least 1600 consecutive nucleotides in length and most preferably at least 1800 consecutive nucleotides in length, the consecutive nucleotides being of any one of the nucleic acid sequences given in table A of Example 1. Most preferably the portion is a portion of the nucleic acid of SEQ ID NO: 1. Preferably, the portion encodes an amino acid sequence comprising a SANT domain as defined herein.

[0223] A portion of a nucleic acid encoding a CCA1-like protein as defined herein may be prepared, for example, by making one or more deletions to the nucleic acid. The portions may be used in isolated form or they may be fused to other coding (or non coding) sequences in order to, for example, produce a protein that combines several activities. When fused to other coding sequences, the resultant polypeptide produced upon translation may be bigger than that predicted for the CCA1-like protein portion.

[0224] Another nucleic acid variant useful in the methods of the invention is a nucleic acid capable of hybridising, under reduced stringency conditions, preferably under stringent conditions, with a nucleic acid encoding a CCA1-like protein as defined herein, or with a portion as defined herein. The term “hybridisation” is as defined hereinabove.

[0225] Hybridising sequences useful in the methods of the invention, encode a polypeptide having a SANT domain (see the alignment of FIG. 2) and having substantially the same biological activity as the CCA1-like protein represented by any of the amino acid sequences given in table A of Example 1. The hybridising sequence is typically at least 1200 consecutive nucleotides in length, preferably at least 1400 consecutive nucleotides in length, more preferably at least 1600 consecutive nucleotides in length and most preferably at least 1800 consecutive nucleotides in length, the consecutive nucleotides being of any one of the nucleic acid sequences given in table A of Example 1. Preferably, the hybridising sequence is one that is capable of hybridising to any of the nucleic acids given in table A of Example 1, or to a portion of any of these sequences, a portion being as defined above. Most preferably, the hybridising sequence is capable of hybridising to a nucleic acid as represented by SEQ ID NO: 1 or to a portion thereof. Preferably, the hybridising sequence encodes an amino acid sequence comprising any one or more of the motifs or domains as defined herein.

[0226] According to the present invention, there is provided a method for enhancing yield-related traits in plants, comprising introducing and expressing in a plant a nucleic acid capable of hybridizing to any one of the nucleic acids given in the table of Example 1, or comprising introducing and expressing in a plant a nucleic acid capable of hybridising to a nucleic acid encoding an orthologue, paralogue or homologue of any of the nucleic acid sequences given in the table of Example 1.

[0227] Another nucleic acid variant useful in the methods of the invention is a splice variant encoding a CCA1-like protein as defined hereinabove, the term “splice variant” being as defined herein

[0228] According to the present invention, there is provided a method for enhancing yield-related traits in plants, comprising introducing and expressing in a plant a splice variant of any one of the nucleic acid sequences given in table A of Example 1, or a splice variant of a nucleic acid encoding an orthologue, paralogue or homologue of any of the amino acid sequences given in table A of Example 1.

[0229] Preferred splice variants are splice variants of a nucleic acid represented by SEQ ID NO: 1 or a splice variant of a nucleic acid encoding an orthologue or paralogue of SEQ ID NO: 2. Preferably, the amino acid sequence encoded by the splice variant comprises any one or more of the motifs or domains as defined herein.

[0230] Another nucleic acid variant useful in performing the methods of the invention is an allelic variant of a nucleic acid encoding a CCA1-like protein as defined hereinabove, the term “alleic variant” being as defined herein. The allelic variants useful in the methods of the present invention have substantially the same biological activity as the CCA1-like protein of SEQ ID NO: 2.

[0231] According to the present invention, there is provided a method for enhancing yield-related traits in plants, comprising introducing and expressing in a plant an allelic variant of any one of the nucleic acids given in table A of Example 1, or comprising introducing and expressing in a plant an allelic variant of a nucleic acid encoding an orthologue, paralogue or homologue of any of the amino acid sequences given in table A of Example 1.

[0232] Preferably, the allelic variant is an allelic variant of SEQ ID NO: 1 or an allelic variant of a nucleic acid encoding an orthologue or paralogue of SEQ ID NO: 2. Preferably, the amino acid sequence encoded by the allelic variant comprises any one or more of the motifs or domains as defined herein.

[0233] A further nucleic acid variant useful in the methods of the invention is a nucleic acid variant encoding CCA1-like proteins as defined above, which variant is obtained by gene shuffling; “gene shuffling” or “directed evolution” are as defined herein.

[0234] According to the present invention, there is provided a method for enhancing yield-related traits in plants, comprising introducing and expressing in a plant a variant of any one of the nucleic acid sequences given in table A of Example 1, or comprising introducing and expressing in a plant a variant of a nucleic acid encoding an orthologue, paralogue or homologue of any of the amino acid sequences given in table A of Example 1, which variant nucleic acid is obtained by gene shuffling. Preferably, the variant nucleic acid obtained by gene shuffling encodes an amino acid sequence comprising any one or more of the motifs or domains as defined herein.

[0235] Furthermore, nucleic acid variants may also be obtained by site-directed mutagenesis. Several methods are available to achieve site-directed mutagenesis, the most common being PCR based methods (Current Protocols in Molecular Biology. Wiley Eds.).

[0236] Nucleic acids encoding CCA1-like proteins may be derived from any natural or artificial source. The nucleic acid may be modified from its native form in composition and/or genomic environment through deliberate human manipulation. Preferably the CCA1-like-encoding nucleic acid is from a plant, further preferably from a dicotyledonous plant, more preferably from the Brassicaceae family, most preferably the nucleic acid is from Arabidopsis thaliana.

[0237] Any reference herein to a CCA1-like protein is therefore taken to mean a CCA1-like protein as defined above. Any nucleic acid encoding such a CCA1-like protein is suitable for use in performing the methods of the invention.

[0238] The present invention also encompasses plants or parts thereof (including seeds) obtainable by the methods according to the present invention. The plants or parts thereof comprise a nucleic acid transgene encoding a CCA1-like protein as defined above.

[0239] The invention also provides genetic constructs and vectors to facilitate introduction and/or expression of the nucleic acid sequences useful in the methods according to the invention, in a plant. The gene constructs may be inserted into vectors, which may be commercially available, suitable for transforming into plants and suitable for expression of the gene of interest in the transformed cells. The invention also provides use of a gene construct as defined herein in the methods of the invention.

[0240] More specifically, the present invention provides a construct comprising
[0241] (a) nucleic acid encoding CCA1-like protein as defined above;
[0242] (b) one or more control sequences capable of driving expression of the nucleic acid sequence of (a); and optionally
[0243] (c) a transcription termination sequence.

[0244] Plants are transformed with a vector comprising the sequence of interest (i.e., a nucleic acid encoding a CCA1-like polypeptide as defined herein. The skilled artisan is well aware of the genetic elements that must be present on the vector in order to successfully transform, select and propagate host cells containing the sequence of interest. The sequence of interest is operably linked to one or more control sequences (at least to a promoter). The terms “regulatory element”, “control sequence” and “promoter” are as defined hereinabove. The term “operably linked” is also as defined herein.

[0245] Advantageously, any type of promoter may be used to drive expression of the nucleic acid sequence.

[0246] The promoter may be a constitutive promoter. The term “constitutive promoter” is as defined herein, and examples of constitutive promoters are also given in the Definitions section herein. Alternatively, the promoter may be an inducible promoter, as defined in the Definitions section herein. Additionally or alternatively, the promoter may be an organ-specific or tissue-specific promoter, also as defined herein.

[0247] Preferably, the CCA1-like nucleic acid or variant thereof is operably linked to a constitutive promoter. A preferred constitutive promoter is one that is also substantially ubiquitously expressed. Further preferably the promoter is derived from a plant, more preferably a monocotyledonous plant. Most preferred is use of a GOS2 promoter (preferably from rice) (SEQ ID NO: 146). It should be clear that the applicability of the present invention is not restricted to the CCA1-like nucleic acid represented by SEQ ID NO: 1, nor is the applicability of the invention restricted to expression of a CCA1-like nucleic acid when driven by a GOS2 promoter. Examples of other constitutive promoters which may also be used to drive expression of a CCA1-like nucleic acid are shown in the Definitions section herein.

[0248] It is envisaged that the increase in yield will also be obtained when the CCA1-like nucleic acid or variant thereof is operably linked to a green-tissue specific promoter. Examples of green tissue-specific promoters are provided in the Definitions section herein.

[0249] For the identification of functionally equivalent promoters, the promoter strength and/or expression pattern of a candidate promoter may be analysed for example by operably linking the promoter to a reporter gene and assay the expression level and pattern of the reporter gene in various tissues of the plant. Suitable well-known reporter genes include for example beta-glucuronidase or beta galactosidase. The promoter activity is assayed by measuring the enzymatic activity of the beta-glucuronidase or beta-galactosidase. The promoter strength and/or expression pattern may then be compared to that of a reference promoter (such as the one used in the methods of the present invention). Alternatively, promoter strength may be assayed by quantifying mRNA levels or by comparing mRNA levels of the nucleic acid used in the methods of the present invention, with mRNA levels of housekeeping genes such as 18S rRNA, using methods known in the art, such as Northern blotting with densitometric analysis of autoradiograms, quantitative real-time PCR or RT-PCR (Heid et al., 1996 Genome Methods 6: 986-994). Generally by “weak promoter” is intended a promoter that drives expression of a coding sequence at a low level. By “low level” is intended at levels of about 1/10,000 transcripts to about 1/100,000 transcripts, to about 1/500,0000 transcripts per cell. Conversely, a “strong promoter” drives expression of a coding sequence at high level, or at about 1/10 transcripts to about 1/100 transcripts to about 1/1,000 transcripts per cell.

[0250] Optionally, one or more terminator sequences may be used in the construct introduced into a plant, the term “terminator” being as defined herein. Additional regulatory elements may include transcriptional as well as translational enhancers. Those skilled in the art will be aware of terminator and enhancer sequences that may be suitable for use in performing the invention. Such sequences would be known or may readily be obtained by a person skilled in the art.

[0251] An intron sequence may also be added to the 5′ untranslated region (UTR) or in the coding sequence to increase the amount of the mature message that accumulates in the cytosol. Inclusion of a spliceable intron in the transcription unit in both plant and animal expression constructs has been shown to increase gene expression at both the mRNA and protein levels up to 1000-fold (Buchman and Berg, Mol. Cell Biol. 8:4395-4405 (1988); Callis et al., Genes Dev. 1:1183-1200 (1987)). Such intron enhancement of gene expression is typically greatest when placed near the 5′ end of the transcription unit. Use of the maize introns Adh1-S intron 1, 2, and 6, the Bronze-1 intron are known in the art. For general information, see The Maize Handbook, Chapter 116, Freeling and Walbot, Eds., Springer, N.Y. (1994).

[0252] Other control sequences (besides promoter, enhancer, silencer, intron sequences, 3′UTR and/or 5′UTR regions) may be protein and/or RNA stabilizing elements. Such sequences would be known or may readily be obtained by a person skilled in the art.

[0253] The genetic constructs of the invention may further include an origin of replication sequence that is required for maintenance and/or replication in a specific cell type. One example is when a genetic construct is required to be maintained in a bacterial cell as an episomal genetic element (e.g. plasmid or cosmid molecule). Preferred origins of replication include, but are not limited to, the f1-ori and colE1.

[0254] For the detection of the successful transfer of the nucleic acid sequences as used in the methods of the invention and/or selection of transgenic plants comprising these nucleic acids, it is advantageous to use marker genes (or reporter genes). Therefore, the genetic construct may optionally comprise a selectable marker gene. The terms “selectable marker”, “selectable marker gene” or “reporter gene” are as defined hereinabove.

[0255] It is known that upon stable or transient integration of nucleic acids into plant cells, only a minority of the cells takes up the foreign DNA and, if desired, integrates it into its genome, depending on the expression vector used and the transfection technique used. To identify and select these integrants, a gene coding for a selectable marker (such as the ones described above) is usually introduced into the host cells together with the gene of interest. These markers can for example be used in mutants in which these genes are not functional by, for example, deletion by conventional methods. Furthermore, nucleic acid molecules encoding a selectable marker can be introduced into a host cell on the same vector that comprises the sequence encoding the polypeptides of the invention or used in the methods of the invention, or else in a separate vector. Cells which have been stably transfected with the introduced nucleic acid can be identified for example by selection (for example, cells which have integrated the selectable marker survive whereas the other cells die).

[0256] Since the marker genes, particularly genes for resistance to antibiotics and herbicides, are no longer required or are undesired in the transgenic host cell once the nucleic acids have been introduced successfully, the process according to the invention for introducing the nucleic acids advantageously employs techniques which enable the removal or excision of these marker genes. One such a method is what is known as co-transformation. The co-transformation method employs two vectors simultaneously for the transformation, one vector bearing the nucleic acid according to the invention and a second bearing the marker gene(s). A large proportion of transformants receives or, in the case of plants, comprises (up to 40% or more of the transformants), both vectors. In case of transformation with Agrobacteria, the transformants usually receive only a part of the vector, i.e. the sequence flanked by the T-DNA, which usually represents the expression cassette. The marker genes can subsequently be removed from the transformed plant by performing crosses. In another method, marker genes integrated into a transposon are used for the transformation together with desired nucleic acid (known as the Ac/Ds technology). The transformants can be crossed with a transposase source or the transformants are transformed with a nucleic acid construct conferring expression of a transposase, transiently or stable. In some cases (approx. 10%), the transposon jumps out of the genome of the host cell once transformation has taken place successfully and is lost. In a further number of cases, the transposon jumps to a different location. In these cases the marker gene must be eliminated by performing crosses. In microbiology, techniques were developed which make possible, or facilitate, the detection of such events. A further advantageous method relies on what is known as recombination systems; whose advantage is that elimination by crossing can be dispensed with. The best-known system of this type is what is known as the Cre/lox system. Cre1 is a recombinase that removes the sequences located between the loxP sequences. If the marker gene is integrated between the loxP sequences, it is removed once transformation has taken place successfully, by expression of the recombinase. Further recombination systems are the HIN/HIX, FLP/FRT and REP/STB system (Tribble et al., J. Biol. Chem., 275, 2000: 22255-22267; Velmurugan et al., J. Cell Biol., 149, 2000: 553-566). A site-specific integration into the plant genome of the nucleic acid sequences according to the invention is possible. Naturally, these methods can also be applied to microorganisms such as yeast, fungi or bacteria.

[0257] The invention also provides a method for the production of transgenic plants having enhanced yield-related traits relative to control plants, comprising introduction and expression in a plant of any nucleic acid encoding a CCA1-like protein as defined hereinabove.

[0258] For the purposes of the invention, “transgenic”, “transgene” or “recombinant” are as defined in the Definitions section herein. It is envisaged that the introduction of multiple copies of a naturally-occurring expression cassette as described above would also be useful in the methods of the present invention.

[0259] More specifically, the present invention provides a method for the production of transgenic plants having increased yield, which method comprises:
[0260] (i) introducing and expressing in a plant or plant cell a CCA1-like nucleic acid or variant thereof; and
[0261] (ii) cultivating the plant cell under conditions promoting plant growth and development.

[0262] The nucleic acid may be introduced directly into a plant cell or into the plant itself (including introduction into a tissue, organ or any other part of a plant). According to a preferred feature of the present invention, the nucleic acid is preferably introduced into a plant by transformation.

[0263] The term “introduction” or “transformation” is defined in the Definitions section herein. The genetically modified plant cells can be regenerated via all methods with which the skilled worker is familiar. Suitable methods can be found in the abovementioned publications by S. D. Kung and R. Wu, Potrykus or Höfgen and Willmitzer.

[0264] Generally after transformation, plant cells or cell groupings are selected for the presence of one or more markers which are encoded by plant-expressible genes co-transferred with the gene of interest, following which the transformed material is regenerated into a whole plant. To select transformed plants, the plant material obtained in the transformation is, as a rule, subjected to selective conditions so that transformed plants can be distinguished from untransformed plants. For example, the seeds obtained in the above-described manner can be planted and, after an initial growing period, subjected to a suitable selection by spraying. A further possibility consists in growing the seeds, if appropriate after sterilization, on agar plates using a suitable selection agent so that only the transformed seeds can grow into plants. Alternatively, the transformed plants are screened for the presence of a selectable marker such as the ones described above.

[0265] Following DNA transfer and regeneration, putatively transformed plants may also be evaluated, for instance using Southern analysis, for the presence of the gene of interest, copy number and/or genomic organisation. Alternatively or additionally, expression levels of the newly introduced DNA may be monitored using Northern and/or Western analysis, both techniques being well known to persons having ordinary skill in the art.

[0266] The generated transformed plants may be propagated by a variety of means, such as by clonal propagation or classical breeding techniques. For example, a first generation (or T1) transformed plant may be selfed and homozygous second-generation (or T2) transformants selected, and the T2 plants may then further be propagated through classical breeding techniques.

[0267] The generated transformed organisms may take a variety of forms. For example, they may be chimeras of transformed cells and non-transformed cells; clonal transformants (e.g., all cells transformed to contain the expression cassette); grafts of transformed and untransformed tissues (e.g., in plants, a transformed rootstock grafted to an untransformed scion).

[0268] The present invention clearly extends to any plant cell or plant produced by any of the methods described herein, and to all plant parts and propagules thereof. The present invention extends further to encompass the progeny of a primary transformed or transfected cell, tissue, organ or whole plant that has been produced by any of the aforementioned methods, the only requirement being that progeny exhibit the same genotypic and/or phenotypic characteristic(s) as those produced by the parent in the methods according to the invention.

[0269] The invention also includes host cells containing an isolated nucleic acid encoding a CCA1-like protein as defined hereinabove. Preferred host cells according to the invention are plant cells.

[0270] Host plants for the nucleic acids or the vector used in the method according to the invention, the expression cassette or construct or vector are, in principle, advantageously all plants, which are capable of synthesizing the polypeptides used in the inventive method.

[0271] A transgenic plant for the purposes of the invention is thus understood as meaning, as above, that the nucleic acids used in the method of the invention are not at their natural locus in the genome of said plant, it being possible for the nucleic acids to be expressed homologously or heterologously. However, as mentioned, transgenic also means that, while the nucleic acids according to the invention or used in the inventive method are at their natural position in the genome of a plant, the sequence has been modified with regard to the natural sequence, and/or that the regulatory sequences of the natural sequences have been modified. Transgenic is preferably understood as meaning the expression of the nucleic acids according to the invention at an unnatural locus in the genome, i.e. homologous or, preferably, heterologous expression of the nucleic acids takes place. Preferred transgenic plants are mentioned herein.

[0272] The invention also extends to harvestable parts of a plant such as, but not limited to seeds, leaves, fruits, flowers, stems, rhizomes, tubers and bulbs. The invention furthermore relates to products derived, preferably directly derived, from a harvestable part of such a plant, such as dry pellets or powders, oil, fat and fatty acids, starch or proteins.

[0273] According to a preferred feature of the invention, the modulated expression is increased expression. Methods for increasing expression of nucleic acids or genes, or gene products, are well documented in the art and include, for example, overexpression driven by appropriate promoters, the use of transcription enhancers or translation enhancers. Isolated nucleic acids which serve as promoter or enhancer elements may be introduced in an appropriate position (typically upstream) of a non-heterologous form of a polynucleotide so as to upregulate expression. For example, endogenous promoters may be altered in vivo by mutation, deletion, and/or substitution (see, Kmiec, U.S. Pat. No. 5,565,350; Zarling et al., PCT/US93/03868), or isolated promoters may be introduced into a plant cell in the proper orientation and distance from a gene of the present invention so as to control the expression of the gene.

[0274] If polypeptide expression is desired, it is generally desirable to include a polyadenylation region at the 3′-end of a polynucleotide coding region. The polyadenylation region can be derived from the natural gene, from a variety of other plant genes, or from T-DNA. The 3′ end sequence to be added may be derived from, for example, the nopaline synthase or octopine synthase genes, or alternatively from another plant gene, or less preferably from any other eukaryotic gene.

[0275] An intron sequence may also be added as described above.

[0276] Other control sequences (besides promoter, enhancer, silencer, intron sequences, 3′UTR and/or 5′UTR regions) may be protein and/or RNA stabilizing elements.

[0277] As mentioned above, a preferred method for modulating (preferably, increasing) expression of a nucleic acid encoding a CCA1-like protein is by introducing and expressing in a plant a nucleic acid encoding a CCA1-like protein; however the effects of performing the method, i.e. enhancing yield-related traits may also be achieved using other well known techniques. A description of some of these techniques will now follow.

[0278] One such technique is T-DNA activation tagging as defined herein. The effects of the invention may also be reproduced using the technique of TILLING (Targeted Induced Local Lesions In Genomes), which technique is defined in the Definitions section herein. The effects of the invention may also be reproduced using homologous recombination, which technique is as defined herein.

[0279] Reference herein to enhanced yield-related traits is taken to mean an increase in biomass (weight) of one or more parts of a plant, which may include aboveground (harvestable) parts and/or (harvestable) parts below ground.

[0280] In particular, such harvestable parts are seeds, and performance of the methods of the invention results in plants having increased seed yield relative to the seed yield of suitable control plants.

[0281] The term “yield” and “seed yield” are as defined herein, and the terms “increase”, “improving” or “improve” are also as defined herein.

[0282] Taking corn as an example, a yield increase may be manifested as one or more of the following: increase in the number of plants established per hectare or acre, an increase in the number of ears per plant, an increase in the number of rows, number of kernels per row, kernel weight, thousand kernel weight, ear length/diameter, increase in the seed filling rate (which is the number of filled seeds divided by the total number of seeds and multiplied by 100), among others. Taking rice as an example, a yield increase may manifest itself as an increase in one or more of the following: number of plants per hectare or acre, number of panicles per plant, number of spikelets per panicle, number of flowers (florets) per panicle (which is expressed as a ratio of the number of filled seeds over the number of primary panicles), increase in the seed filling rate (which is the number of filled seeds divided by the total number of seeds and multiplied by 100), increase in thousand kernel weight, among others.

[0283] Since the transgenic plants according to the present invention have increased yield, it is likely that these plants exhibit an increased growth rate (during at least part of their life cycle), relative to the growth rate of control plants at a corresponding stage in their life cycle. The increased growth rate may be specific to one or more parts of a plant (including seeds), or may be throughout substantially the whole plant. Plants having an increased growth rate may have a shorter life cycle. The life cycle of a plant may be taken to mean the time needed to grow from a dry mature seed up to the stage where the plant has produced dry mature seeds, similar to the starting material. This life cycle may be influenced by factors such as early vigour, growth rate, greenness index, flowering time and speed of seed maturation. The increase in growth rate may take place at one or more stages in the life cycle of a plant or during substantially the whole plant life cycle. Increased growth rate during the early stages in the life cycle of a plant may reflect enhanced vigour. The increase in growth rate may alter the harvest cycle of a plant allowing plants to be sown later and/or harvested sooner than would otherwise be possible (a similar effect may be obtained with earlier flowering time). If the growth rate is sufficiently increased, it may allow for the further sowing of seeds of the same plant species (for example sowing and harvesting of rice plants followed by sowing and harvesting of further rice plants all within one conventional growing period). Similarly, if the growth rate is sufficiently increased, it may allow for the further sowing of seeds of different plants species (for example the sowing and harvesting of corn plants followed by, for example, the sowing and optional harvesting of soy bean, potato or any other suitable plant). Harvesting additional times from the same rootstock in the case of some crop plants may also be possible. Altering the harvest cycle of a plant may lead to an increase in annual biomass production per acre (due to an increase in the number of times (say in a year) that any particular plant may be grown and harvested). An increase in growth rate may also allow for the cultivation of transgenic plants in a wider geographical area than their wild-type counterparts, since the territorial limitations for growing a crop are often determined by adverse environmental conditions either at the time of planting (early season) or at the time of harvesting (late season). Such adverse conditions may be avoided if the harvest cycle is shortened. The growth rate may be determined by deriving various parameters from growth curves, such parameters may be: T-Mid (the time taken for plants to reach 50% of their maximal size) and T-90 (time taken for plants to reach 90% of their maximal size), amongst others.

[0284] According to a preferred feature of the present invention, performance of the methods of the invention gives plants having an increased growth rate relative to control plants. Therefore, according to the present invention, there is provided a method for increasing the growth rate of plants, which method comprises modulating expression, preferably increasing expression, in a plant of a nucleic acid encoding a CCA1-like protein as defined herein.

[0285] An increase in yield and/or growth rate occurs whether the plant is under non-stress conditions or whether the plant is exposed to various stresses compared to control plants. Plants typically respond to exposure to stress by growing more slowly. In conditions of severe stress, the plant may even stop growing altogether. Mild stress on the other hand is defined herein as being any stress to which a plant is exposed which does not result in the plant ceasing to grow altogether without the capacity to resume growth. Mild stress in the sense of the invention leads to a reduction in the growth of the stressed plants of less than 40%, 35% or 30%, preferably less than 25%, 20% or 15%, more preferably less than 14%, 13%, 12%, 11% or 10% or less in comparison to the control plant under non-stress conditions. Due to advances in agricultural practices (irrigation, fertilization, pesticide treatments) severe stresses are not often encountered in cultivated crop plants. As a consequence, the compromised growth induced by mild stress is often an undesirable feature for agriculture. Mild stresses are the everyday biotic and/or abiotic (environmental) stresses to which a plant is exposed. Abiotic stresses may be due to drought or excess water, anaerobic stress, salt stress, chemical toxicity, oxidative stress and hot, cold or freezing temperatures. The abiotic stress may be an osmotic stress caused by a water stress (particularly due to drought), salt stress, oxidative stress or an ionic stress. Biotic stresses are typically those stresses caused by pathogens, such as bacteria, viruses, fungi and insects.

[0286] In particular, the methods of the present invention may be performed under non-stress conditions or under conditions of mild drought to give plants having increased yield relative to control plants. As reported in Wang et al. (Planta (2003) 218: 1-14), abiotic stress leads to a series of morphological, physiological, biochemical and molecular changes that adversely affect plant growth and productivity. Drought, salinity, extreme temperatures and oxidative stress are known to be interconnected and may induce growth and cellular damage through similar mechanisms. Rabbani et al. (Plant Physiol (2003) 133: 1755-1767) describes a particularly high degree of “cross talk” between drought stress and high-salinity stress. For example, drought and/or salinisation are manifested primarily as osmotic stress, resulting in the disruption of homeostasis and ion distribution in the cell. Oxidative stress, which frequently accompanies high or low temperature, salinity or drought stress, may cause denaturing of functional and structural proteins. As a consequence, these diverse environmental stresses often activate similar cell signalling pathways and cellular responses, such as the production of stress proteins, up-regulation of anti-oxidants, accumulation of compatible solutes and growth arrest. The term “non-stress” conditions as used herein are those environmental conditions that allow optimal growth of plants. Persons skilled in the art are aware of normal soil conditions and climatic conditions for a given location.

[0287] Performance of the methods of the invention gives plants grown under non-stress conditions or under mild drought conditions increased yield relative to suitable control plants grown under comparable conditions. Therefore, according to the present invention, there is provided a method for increasing yield in plants grown under non-stress conditions or under mild drought conditions, which method comprises increasing expression in a plant of a nucleic acid encoding a CCA1-like polypeptide.

[0288] In a preferred embodiment of the invention, the increase in yield and/or growth rate occurs according to the methods of the present invention under non-stress conditions.

[0289] The methods of the invention are advantageously applicable to any plant, the term “plant” being as defined herein.

[0290] According to a preferred embodiment of the present invention, the plant is a crop plant. Examples of crop plants include soybean, sunflower, canola, alfalfa, rapeseed, cotton, tomato, potato and tobacco. Further preferably, the plant is a monocotyledonous plant. Examples of monocotyledonous plants include sugarcane. More preferably the plant is a cereal. Examples of cereals include rice, maize, wheat, barley, millet, rye, sorghum and oats.

[0291] The present invention also encompasses use of nucleic acids encoding the CCA1-like protein described herein and use of these CCA1-like proteins in enhancing yield-related traits in plants.

[0292] Nucleic acids encoding the CCA1-like protein described herein, or the CCA1-like proteins themselves, may find use in breeding programmes in which a DNA marker is identified which may be genetically linked to a CCA1-like-encoding gene. The nucleic acids/genes, or the CCA1-like proteins themselves may be used to define a molecular marker. This DNA or protein marker may then be used in breeding programmes to select plants having enhanced yield-related traits as defined hereinabove in the methods of the invention.

[0293] Allelic variants of a CCA1-like protein-encoding nucleic acid/gene may also find use in marker-assisted breeding programmes. Such breeding programmes sometimes require introduction of allelic variation by mutagenic treatment of the plants, using for example EMS mutagenesis; alternatively, the programme may start with a collection of allelic variants of so called “natural” origin caused unintentionally. Identification of allelic variants then takes place, for example, by PCR. This is followed by a step for selection of superior allelic variants of the sequence in question and which give increased yield. Selection is typically carried out by monitoring growth performance of plants containing different allelic variants of the sequence in question. Growth performance may be monitored in a greenhouse or in the field. Further optional steps include crossing plants in which the superior allelic variant was identified with another plant. This could be used, for example, to make a combination of interesting phenotypic features.

[0294] Nucleic acids encoding CCA1-like proteins may also be used as probes for genetically and physically mapping the genes that they are a part of, and as markers for traits linked to those genes. Such information may be useful in plant breeding in order to develop lines with desired phenotypes. Such use of CCA1-like protein-encoding nucleic acids requires only a nucleic acid sequence of at least 15 nucleotides in length. The CCA1-like protein-encoding nucleic acids may be used as restriction fragment length polymorphism (RFLP) markers. Southern blots (Sambrook J, Fritsch E F and Maniatis T (1989) Molecular Cloning, A Laboratory Manual) of restriction-digested plant genomic DNA may be probed with the CCA1-like protein-encoding nucleic acids. The resulting banding patterns may then be subjected to genetic analyses using computer programs such as MapMaker (Lander et al. (1987) Genomics 1: 174-181) in order to construct a genetic map. In addition, the nucleic acids may be used to probe Southern blots containing restriction endonuclease-treated genomic DNAs of a set of individuals representing parent and progeny of a defined genetic cross. Segregation of the DNA polymorphisms is noted and used to calculate the position of the CCA1-like protein-encoding nucleic acid in the genetic map previously obtained using this population (Botstein et al. (1980) Am. J. Hum. Genet. 32:314-331).

[0295] The production and use of plant gene-derived probes for use in genetic mapping is described in Bernatzky and Tanksley (1986) Plant Mol. Biol. Reporter 4: 37-41. Numerous publications describe genetic mapping of specific cDNA clones using the methodology outlined above or variations thereof. For example, F2 intercross populations, backcross populations, randomly mated populations, near isogenic lines, and other sets of individuals may be used for mapping. Such methodologies are well known to those skilled in the art.

[0296] The nucleic acid probes may also be used for physical mapping (i.e., placement of sequences on physical maps; see Hoheisel et al. In: Non-mammalian Genomic Analysis: A Practical Guide, Academic press 1996, pp. 319-346, and references cited therein).

[0297] In another embodiment, the nucleic acid probes may be used in direct fluorescence in situ hybridisation (FISH) mapping (Trask (1991) Trends Genet. 7:149-154). Although current methods of FISH mapping favour use of large clones (several kb to several hundred kb; see Laan et al. (1995) Genome Res. 5:13-20), improvements in sensitivity may allow performance of FISH mapping using shorter probes.

[0298] A variety of nucleic acid amplification-based methods for genetic and physical mapping may be carried out using the nucleic acids. Examples include allele-specific amplification (Kazazian (1989) J. Lab. Clin. Med 11:95-96), polymorphism of PCR-amplified fragments (CAPS; Sheffield et al. (1993) Genomics 16:325-332), allele-specific ligation (Landegren et al. (1988) Science 241:1077-1080), nucleotide extension reactions (Sokolov (1990) Nucleic Acid Res. 18:3671), Radiation Hybrid Mapping (Walter et al. (1997) Nat. Genet. 7:22-28) and Happy Mapping (Dear and Cook (1989) Nucleic Acid Res. 17:6795-6807). For these methods, the sequence of a nucleic acid is used to design and produce primer pairs for use in the amplification reaction or in primer extension reactions. The design of such primers is well known to those skilled in the art. In methods employing PCR-based genetic mapping, it may be necessary to identify DNA sequence differences between the parents of the mapping cross in the region corresponding to the instant nucleic acid sequence. This, however, is generally not necessary for mapping methods.

[0299] The methods according to the present invention result in plants having enhanced yield-related traits, as described hereinbefore. These traits may also be combined with other economically advantageous traits, such as further yield-enhancing traits, tolerance to other abiotic and biotic stresses, traits modifying various architectural features and/or biochemical and/or physiological features.

### (iii) SAP

[0300] Surprisingly, it has now been found that modulating expression in a plant of a nucleic acid encoding a SAP-like polypeptide gives plants having enhanced yield-related traits relative to control plants.

[0301] According to a first embodiment, the present invention provides a method for enhancing yield-related traits in plants relative to control plants, comprising modulating expression in a plant of a nucleic acid encoding a SAP-like polypeptide.

[0302] The present invention also provides hitherto unknown SAP-like-encoding nucleic acids and SAP-like polypeptides. These sequences also being useful in performing the methods of the invention.

[0303] According to a further embodiment of the present invention, there is therefore provided an isolated nucleic acid molecule comprising:
[0304] (i) a nucleic acid represented by SEQ ID NO: 212, SEQ ID NO: 214, SEQ ID NO: 216, SEQ ID NO: 218, SEQ ID NO: 220, SEQ ID NO: 222, SEQ ID NO: 224 and SEQ ID NO: 226;
[0305] (ii) the complement of any one of the SEQ ID NOs given in (i);
[0306] (iii) a nucleic acid encoding a SAP-like polypeptide having, in increasing order of preference, at least 70%, 75%, 80%, 85%, 90%, 95%, 96%, 97%, 98%, 99% or 100% sequence identity to any one of the amino acid sequences given in SEQ ID NO: 213, SEQ ID NO: 215 and SEQ ID NO: 217, SEQ ID NO: 219, SEQ ID NO: 221, SEQ ID NO: 223, SEQ ID NO: 225 and SEQ ID NO: 227;
[0307] (iv) a nucleic acid capable of hybridizing under stringent conditions to any one of the nucleic acids given in (i), (ii) or (iii) above.

[0308] According to a further embodiment of the present invention, there is also provided an isolated polypeptide comprising:
[0309] (i) an amino acid sequence represented by any one of SEQ ID NO: 213, SEQ ID NO: 215 and SEQ ID NO: 217, SEQ ID NO: 219, SEQ ID NO: 221, SEQ ID NO: 223, SEQ ID NO: 225 and SEQ ID NO: 227;
[0310] (ii) an amino acid sequence having, in increasing order of preference, at least at least 70%, 75%, 80%, 85%, 90%, 95%, 96%, 97%, 98%, 99% or 100% sequence identity to any one of the amino acid sequences given in SEQ ID NO: 213, SEQ ID NO: 215 and SEQ ID NO: 217, SEQ ID NO: 219, SEQ ID NO: 221, SEQ ID NO: 223, SEQ ID NO: 225 and SEQ ID NO: 227;
[0311] (iii) derivatives of any of the amino acid sequences given in (i) or (ii) above.

[0312] A preferred method for modulating (preferably, increasing) expression of a nucleic acid encoding a SAP-like polypeptide is by introducing and expressing in a plant a nucleic acid encoding a SAP-like polypeptide.

[0313] Any reference hereinafter to a “protein useful in the methods of the invention” is taken to mean a SAP-like polypeptide as defined herein. Any reference hereinafter to a “nucleic acid useful in the methods of the invention” is taken to mean a nucleic acid capable of encoding such a SAP-like polypeptide. The nucleic acid to be introduced into a plant (and therefore useful in performing the methods of the invention) is any nucleic acid encoding the type of protein which will now be described, hereafter also named “SAP-like nucleic acid” or “SAP-like gene”.

[0314] A “SAP-like polypeptide” as defined herein refers to any polypeptide comprising the following SAP domain:
[0315] (i) Motif 1 (SEQ ID NO: 240): XLSSLKVXELRELAKSRGIKGYSKMKKXELVELLS, where X is any amino acid; or
[0316] (ii) a motif having in increasing order of preference at least 60%, 65%, 70%, 75%, 80%, 85%, 90% or 95% or more sequence identity to Motif 1; or
[0317] (iii) A motif having in increasing order of preference at least 60%, 65%, 70%, 75%, 80%, 85%, 90%, 95% or 100% sequence identity to Motif 1 as it appears in SEQ ID NO: 211: DLSTLKVTELRELAKSRGIKGYSKMKKNDLVELLS (SEQ ID NO: 243).

[0318] Additionally, a SAP-like polypeptide may comprise:
[0319] (i) Motif 2 (SEQ ID NO: 241): EKxEIVELFKKVQxxLRxRAxxKxExKxxxExAKAQxxxExxTVDSLLxLLRKHSxDQxKK, where X is any amino acid; or
[0320] (ii) a motif having in increasing order of preference at least 60%, 65%, 70%, 75%, 80%, 85%, 90% or 95% or more sequence identity to Motif 2; or
[0321] (iii) A motif having in increasing order of preference at least 60%, 65%, 70%, 75%, 80%, 85%, 90%, 95% or 100% sequence identity to Motif 2 as it appears in SEQ ID NO: 211: EKEIVELFKRVQAQLRARGKGKEEKKPEQAKAQGERGSVDSLLNLLRKHSVDQR RK (SEQ ID NO: 244); and/or
[0322] (iv) Motif 3 (SEQ ID NO: 242): RPxSxFxRRSPVP, where X is any amino acid; or
[0323] (v) a motif having in increasing order of preference at least 60%, 65%, 70%, 75%, 80%, 85%, 90%, 95% or more sequence identity to Motif 3;
[0324] (vi) A motif having in increasing order of preference at least 60%, 65%, 70%, 75%, 80%, 85%, 90%, 95% or 100% sequence identity to Motif 3 as it appears in SEQ ID NO: 211: RPASNFRRRSPVP (SEQ ID NO: 245).

[0325] The term “domain” and “motif” is defined in the “definitions” section herein. Specialist databases exist for the identification of domains, for example, SMART (Schultz et al. (1998) Proc. Natl. Acad. Sci. USA 95, 5857-5864; Letunic et al. (2002) Nucleic Acids Res 30, 242-244, InterPro (Mulder et al., (2003) Nucl. Acids. Res. 31, 315-318, Prosite (Bucher and Bairoch (1994), A generalized profile syntax for biomolecular sequences motifs and its function in automatic sequence interpretation. (In) ISMB-94; Proceedings 2nd International Conference on Intelligent Systems for Molecular Biology. Altman R., Brutlag D., Karp P., Lathrop R., Searls D., Eds., pp 53-61, AAAIPress, Menlo Park; Hulo et al., Nucl. Acids. Res. 32:D134-D137, (2004), or Pfam (Bateman et al., Nucleic Acids Research 30(1): 276-280 (2002). A set of tools for in silico analysis of protein sequences is available on the ExPASY proteomics server (hosted by the Swiss Institute of Bioinformatics (Gasteiger et al., ExPASy: the proteomics server for in-depth protein knowledge and analysis, Nucleic Acids Res. 31:3784-3788 (2003)). Domains may also be identified using routine techniques, such as by sequence alignment.

[0326] Methods for the alignment of sequences for comparison are well known in the art, such methods include GAP, BESTFIT, BLAST, FASTA and TFASTA. GAP uses the algorithm of Needleman and Wunsch ((1970) J Mol Biol 48: 443-453) to find the global (i.e. spanning the complete sequences) alignment of two sequences that maximizes the number of matches and minimizes the number of gaps. The BLAST algorithm (Altschul et al. (1990) J Mol Biol 215: 403-10) calculates percent sequence identity and performs a statistical analysis of the similarity between the two sequences. The software for performing BLAST analysis is publicly available through the National Centre for Biotechnology Information (NCBI). Homologues may readily be identified using, for example, the ClustalW multiple sequence alignment algorithm (version 1.83), with the default pairwise alignment parameters, and a scoring method in percentage. Global percentages of similarity and identity may also be determined using one of the methods available in the MatGAT software package (Campanella et al., BMC Bioinformatics. 2003 Jul. 10; 4:29. MatGAT: an application that generates similarity/identity matrices using protein or DNA sequences.). Minor manual editing may be performed to optimise alignment between conserved motifs, as would be apparent to a person skilled in the art. Furthermore, instead of using full-length sequences for the identification of homologues, specific domains may also be used. The sequence identity values, which are indicated below in the Example section as a percentage were determined over the entire nucleic acid or amino acid sequence, and/or over selected domains or conserved motif(s), using the programs mentioned above using the default parameters.

[0327] Furthermore, SAP-like polypeptides (at least in their native form) typically have DNA-binding activity. Tools and techniques for measuring DNA-binding activity are well known in the art; one such example is given in the Examples section herein.

[0328] The present invention is illustrated by transforming plants with the nucleic acid sequence represented by SEQ ID NO: 210, encoding the polypeptide sequence of SEQ ID NO: 211. However, performance of the invention is not restricted to these sequences; the methods of the invention may advantageously be performed using any SAP-like-encoding nucleic acid or SAP-like polypeptide as defined herein.

[0329] Examples of nucleic acids encoding SAP-like polypeptides are given in Table C1 herein. Such nucleic acids are useful in performing the methods of the invention. The amino acid sequences given in Table C1 are example sequences of orthologues and paralogues of the SAP-like polypeptide represented by SEQ ID NO: 211, the terms “orthologues” and “paralogues” being as defined herein. Further orthologues and paralogues may readily be identified by performing a so-called reciprocal blast search. Typically, this involves a first BLAST involving BLASTing a query sequence (for example using any of the sequences listed in Table C1) against any sequence database, such as the publicly available NCBI database. BLASTN or TBLASTX (using standard default values) are generally used when starting from a nucleotide sequence, and BLASTP or TBLASTN (using standard default values) when starting from a protein sequence. The BLAST results may optionally be filtered. The full-length sequences of either the filtered results or non-filtered results are then BLASTed back (second BLAST) against sequences from the organism from which the query sequence is derived (where the query sequence is SEQ ID NO: 210 or SEQ ID NO: 211, the second BLAST would therefore be against rice sequences). The results of the first and second BLASTs are then compared. A paralogue is identified if a high-ranking hit from the first blast is from the same species as from which the query sequence is derived, a BLAST back then ideally results in the query sequence amongst the highest hits; an orthologue is identified if a high-ranking hit in the first BLAST is not from the same species as from which the query sequence is derived, and preferably results upon BLAST back in the query sequence being among the highest hits.

[0330] High-ranking hits are those having a low E-value. The lower the E-value, the more significant the score (or in other words the lower the chance that the hit was found by chance). Computation of the E-value is well known in the art. In addition to E-values, comparisons are also scored by percentage identity. Percentage identity refers to the number of identical nucleotides (or amino acids) between the two compared nucleic acid (or polypeptide) sequences over a particular length. In the case of large families, ClustalW may be used, followed by a neighbour joining tree, to help visualize clustering of related genes and to identify orthologues and paralogues.

[0331] Nucleic acid variants may also be useful in practising the methods of the invention. Examples of such variants include nucleic acids encoding homologues and derivatives of any one of the amino acid sequences given in Table C1, the terms “homologue” and “derivative” being as defined herein. Also useful in the methods of the invention are nucleic acids encoding homologues and derivatives of orthologues or paralogues of any one of the amino acid sequences given in Table C1. Homologues and derivatives useful in the methods of the present invention have substantially the same biological and functional activity as the unmodified protein from which they are derived.

[0332] Further nucleic acid variants useful in practising the methods of the invention include portions of nucleic acids encoding SAP-like polypeptides, nucleic acids hybridising to nucleic acids encoding SAP-like polypeptides, splice variants of nucleic acids encoding SAP-like polypeptides, allelic variants of nucleic acids encoding SAP-like polypeptides and variants of nucleic acids encoding SAP-like polypeptides obtained by gene shuffling. The terms hybridising sequence, splice variant, allelic variant and gene shuffling are as described herein.

[0333] Nucleic acids encoding SAP-like polypeptides need not be full-length nucleic acids, since performance of the methods of the invention does not rely on the use of full-length nucleic acid sequences. According to the present invention, there is provided a method for enhancing yield-related traits in plants, comprising introducing and expressing in a plant a portion of any one of the nucleic acid sequences given in Table C1 in the Examples section herein, or a portion of a nucleic acid encoding an orthologue, paralogue or homologue of any of the amino acid sequences given in Table C1.

[0334] A portion of a nucleic acid may be prepared, for example, by making one or more deletions to the nucleic acid. The portions may be used in isolated form or they may be fused to other coding (or non-coding) sequences in order to, for example, produce a protein that combines several activities. When fused to other coding sequences, the resultant polypeptide produced upon translation may be bigger than that predicted for the protein portion.

[0335] Portions useful in the methods of the invention, encode a SAP-like polypeptides as defined herein, and have substantially the same biological activity as the amino acid sequences given in Table C1. Preferably, the portion is a portion of any one of the nucleic acids given in Table C1, or is a portion of a nucleic acid encoding an orthologue or paralogue of any one of the amino acid sequences given in Table C1. In order to perform the methods of the invention, the portion need only encode a SAP domain as defined herein, i.e. encode:
[0336] (a) Motif 1 (SEQ ID NO: 240): XLSSLKVXELRELAKSRGIKGYSKMKKXELVELLS, where X is any amino acid; or
[0337] (b) a motif having in increasing order of preference at least 60%, 65%, 70%, 75%, 80%, 85%, 90% or 95% or more sequence identity to Motif 1; or
[0338] (c) A motif having in increasing order of preference at least 60%, 65%, 70%, 75%, 80%, 85%, 90%, 95% or 100% sequence identity to Motif 1 as it appears in SEQ ID NO: 211: DLSTLKVTELRELAKSRGIKGYSKMKKNDLVELLS (SEQ ID NO: 243).

[0339] The portion therefore need only be around 100 consecutive nucleotides in length, so long as those 100 consecutive nucleotides encode a SAP domain as defined herein. Preferably, the portion encodes a polypeptide comprising the SAP domain as defined herein and Motifs 2 and Motifs 3 as defined herein. Preferably the portion is, in increasing order of preference at least 200, 300, 400, 500, 600, 700, 800, 900, 1,000, 1,100 consecutive nucleotides in length, the consecutive nucleotides being of any one of the nucleic acid sequences given in Table C1, or of a nucleic acid encoding an orthologue or paralogue of any one of the amino acid sequences given in Table C1. Most preferably the portion is a portion of the nucleic acid of SEQ ID NO: 210. Preferably, the portion encodes an amino acid sequence comprising (any one or more of the domains defined herein). Preferably, the portion encodes an amino acid sequence which when used in the construction of a phylogenetic tree, such as the one depicted in FIG. 10, tends to cluster with the group of SAP-like polypeptides comprising the amino acid sequence represented by SEQ ID NO: 211 rather than with any other group.

[0340] Another nucleic acid variant useful in the methods of the invention is a nucleic acid capable of hybridising, under reduced stringency conditions, preferably under stringent conditions, with a nucleic acid encoding a SAP-like polypeptide as defined herein, or with a portion as defined herein.

[0341] According to the present invention, there is provided a method for enhancing yield-related traits in plants, comprising introducing and expressing in a plant a nucleic acid capable of hybridizing to any one of the nucleic acids given in Table C1, or comprising introducing and expressing in a plant a nucleic acid capable of hybridising to a nucleic acid encoding an orthologue, paralogue or homologue of any of the nucleic acid sequences given in Table C1.

[0342] Hybridising sequences useful in the methods of the invention encode a SAP-like polypeptide as defined herein, and have substantially the same biological activity as the amino acid sequences given in Table C1. Preferably, the hybridising sequence is capable of hybridising to any one of the nucleic acids given in Table C1, or to a portion of any of these sequences, a portion being as defined above, or wherein the hybridising sequence is capable of hybridising to a nucleic acid encoding an orthologue or paralogue of any one of the amino acid sequences given in Table C1. Most preferably, the hybridising sequence is capable of hybridising to a nucleic acid as represented by SEQ ID NO: 210 or to a portion thereof. Preferably, the hybridising sequence encodes an amino acid sequence comprising any one or more of the motifs or domains as defined herein. In order to perform the methods of the invention, the hybridising sequence need only encode a SAP domain as defined herein, i.e. encode:
[0343] (a) Motif 1 (SEQ ID NO: 240): XLSSLKVXELRELAKSRGIKGYSKMKKXELVELLS, where X is any amino acid; or
[0344] (b) a motif having in increasing order of preference at least 60%, 65%, 70%, 75%, 80%, 85%, 90% or 95% or more sequence identity to Motif 1; or
[0345] (c) A motif having in increasing order of preference at least 60%, 65%, 70%, 75%, 80%, 85%, 90%, 95% or 100% sequence identity to Motif 1 as it appears in SEQ ID NO: 211: DLSTLKVTELRELAKSRGIKGYSKMKKNDLVELLS (SEQ ID NO: 243).

[0346] Preferably, the hybridising sequence encodes an amino acid sequence which when used in the construction of a phylogenetic tree, such as the one depicted in FIG. 10, tends to cluster with the group of SAP-like polypeptides comprising the amino acid sequence represented by SEQ ID NO: 211 rather than with any other group.

[0347] Another nucleic acid variant useful in the methods of the invention is a splice variant encoding a SAP-like polypeptide as defined hereinabove, a splice variant being as defined herein.

[0348] According to the present invention, there is provided a method for enhancing yield-related traits in plants, comprising introducing and expressing in a plant a splice variant of any one of the nucleic acid sequences given in Table C1, or a splice variant of a nucleic acid encoding an orthologue, paralogue or homologue of any of the amino acid sequences given in Table C1.

[0349] Preferred splice variants are splice variants of a nucleic acid represented by SEQ ID NO: 210, or a splice variant of a nucleic acid encoding an orthologue or paralogue of SEQ ID NO: 211. Preferably, the amino acid sequence encoded by the splice variant comprises any one or more of the motifs or domains as defined herein. In order to perform the methods of the invention, the splice variant need only encode a SAP domain as defined herein. Preferably, the amino acid sequence encoded by the splice variant, when used in the construction of a phylogenetic tree, such as the one depicted in FIG. 10, tends to cluster with the group of SAP-like polypeptides comprising the amino acid sequence represented by SEQ ID NO: 211 rather than with any other group.

[0350] Another nucleic acid variant useful in performing the methods of the invention is an allelic variant of a nucleic acid encoding a SAP-like polypeptide as defined hereinabove, an allelic variant being as defined herein.

[0351] According to the present invention, there is provided a method for enhancing yield-related traits in plants, comprising introducing and expressing in a plant an allelic variant of any one of the nucleic acids given in Table C1, or comprising introducing and expressing in a plant an allelic variant of a nucleic acid encoding an orthologue, paralogue or homologue of any of the amino acid sequences given in Table C1.

[0352] The allelic variants useful in the methods of the present invention have substantially the same biological activity as the SAP-like polypeptide of SEQ ID NO: 211 and any of the amino acids depicted in Table C1. Allelic variants exist in nature, and encompassed within the methods of the present invention is the use of these natural alleles. Preferably, the allelic variant is an allelic variant of SEQ ID NO: 210 or an allelic variant of a nucleic acid encoding an orthologue or paralogue of SEQ ID NO: 211. Preferably, the amino acid encoded by the allelic variant comprises any one or more of the motifs or domains as defined herein. In order to perform the methods of the invention, the allelic variant need only encode a SAP domain as defined herein. Preferably, the amino acid sequence encoded by the allelic variant, when used in the construction of a phylogenetic tree, such as the one depicted in FIG. 10, tends to cluster with the group of SAP-like polypeptides comprising the amino acid sequence represented by SEQ ID NO: 211 rather than with any other group.

[0353] Gene shuffling or directed evolution may also be used to generate variants of nucleic acids encoding SAP-like polypeptides as defined above; the term “gene shuffling” being as defined herein.

[0354] According to the present invention, there is provided a method for enhancing yield-related traits in plants, comprising introducing and expressing in a plant a variant of any one of the nucleic acid sequences given in Table C1, or comprising introducing and expressing in a plant a variant of a nucleic acid encoding an orthologue, paralogue or homologue of any of the amino acid sequences given in Table C1, which variant nucleic acid is obtained by gene shuffling.

[0355] Preferably, the variant nucleic acid obtained by gene shuffling encodes an amino acid sequence comprising any one or more of the motifs or domains as defined herein. In order to perform the methods of the invention, the variant nucleic acid need only encode a SAP domain as defined herein. Preferably, the amino acid sequence encoded by the variant nucleic acid obtained by gene shuffling, when used in the construction of a phylogenetic tree such as the one depicted in FIG. 10, tends to cluster with the group of SAP-like polypeptides comprising the amino acid sequence represented by SEQ ID NO: 211 rather than with any other group.

[0356] Furthermore, nucleic acid variants may also be obtained by site-directed mutagenesis. Several methods are available to achieve site-directed mutagenesis, the most common being PCR based methods (Current Protocols in Molecular Biology. Wiley Eds.).

[0357] Nucleic acids encoding SAP-like polypeptides may be derived from any natural or artificial source. The nucleic acid may be modified from its native form in composition and/or genomic environment through deliberate human manipulation. Preferably the SAP-like polypeptide-encoding nucleic acid is from a plant, further preferably from a monocotyledonous plant, more preferably from the family poaceae, most preferably the nucleic acid is from Oryza sativa.

[0358] Performance of the methods of the invention gives plants having enhanced yield-related traits. In particular performance of the methods of the invention gives plants having increased yield, especially increased seed yield relative to control plants. The terms “yield” and “seed yield” are described in more detail in the “definitions” section herein.

[0359] Reference herein to enhanced yield-related traits is taken to mean an increase in biomass (weight) of one or more parts of a plant, which may include aboveground (harvestable) parts and/or (harvestable) parts below ground. In particular, such harvestable parts are seeds, and performance of the methods of the invention results in plants having increased seed yield relative to the seed yield of suitable control plants.

[0360] Taking corn as an example, a yield increase may be manifested as one or more of the following: increase in the number of plants established per hectare or acre, an increase in the number of ears per plant, an increase in the number of rows, number of kernels per row, kernel weight, thousand kernel weight, ear length/diameter, increase in the seed filling rate (which is the number of filled seeds divided by the total number of seeds and multiplied by 100), among others. Taking rice as an example, a yield increase may manifest itself as an increase in one or more of the following: number of plants per hectare or acre, number of panicles per plant, number of spikelets per panicle, number of flowers (florets) per panicle (which is expressed as a ratio of the number of filled seeds over the number of primary panicles), increase in the seed filling rate (which is the number of filled seeds divided by the total number of seeds and multiplied by 100), increase in thousand kernel weight, among others.

[0361] The present invention provides a method for increasing yield, especially seed yield of plants, relative to control plants, which method comprises modulating expression, preferably increasing expression, in a plant of a nucleic acid encoding a SAP-like polypeptide as defined herein.

[0362] Since the transgenic plants according to the present invention have increased yield, it is likely that these plants exhibit an increased growth rate (during at least part of their life cycle), relative to the growth rate of control plants at a corresponding stage in their life cycle.

[0363] The increased growth rate may be specific to one or more parts of a plant (including seeds), or may be throughout substantially the whole plant. Plants having an increased growth rate may have a shorter life cycle. The life cycle of a plant may be taken to mean the time needed to grow from a dry mature seed up to the stage where the plant has produced dry mature seeds, similar to the starting material. This life cycle may be influenced by factors such as early vigour, growth rate, greenness index, flowering time and speed of seed maturation. The increase in growth rate may take place at one or more stages in the life cycle of a plant or during substantially the whole plant life cycle. Increased growth rate during the early stages in the life cycle of a plant may reflect enhanced vigour. The increase in growth rate may alter the harvest cycle of a plant allowing plants to be sown later and/or harvested sooner than would otherwise be possible (a similar effect may be obtained with earlier flowering time). If the growth rate is sufficiently increased, it may allow for the further sowing of seeds of the same plant species (for example sowing and harvesting of rice plants followed by sowing and harvesting of further rice plants all within one conventional growing period). Similarly, if the growth rate is sufficiently increased, it may allow for the further sowing of seeds of different plants species (for example the sowing and harvesting of corn plants followed by, for example, the sowing and optional harvesting of soybean, potato or any other suitable plant). Harvesting additional times from the same rootstock in the case of some crop plants may also be possible. Altering the harvest cycle of a plant may lead to an increase in annual biomass production per acre (due to an increase in the number of times (say in a year) that any particular plant may be grown and harvested). An increase in growth rate may also allow for the cultivation of transgenic plants in a wider geographical area than their wild-type counterparts, since the territorial limitations for growing a crop are often determined by adverse environmental conditions either at the time of planting (early season) or at the time of harvesting (late season). Such adverse conditions may be avoided if the harvest cycle is shortened. The growth rate may be determined by deriving various parameters from growth curves, such parameters may be: T-Mid (the time taken for plants to reach 50% of their maximal size) and T-90 (time taken for plants to reach 90% of their maximal size), amongst others.

[0364] According to a preferred feature of the present invention, performance of the methods of the invention gives plants having an increased growth rate relative to control plants. Therefore, according to the present invention, there is provided a method for increasing the growth rate of plants, which method comprises modulating expression, preferably increasing expression, in a plant of a nucleic acid encoding a SAP-like polypeptide as defined herein.

[0365] An increase in yield and/or growth rate occurs whether the plant is under non-stress conditions or whether the plant is exposed to various stresses compared to control plants. Plants typically respond to exposure to stress by growing more slowly. In conditions of severe stress, the plant may even stop growing altogether. Mild stress on the other hand is defined herein as being any stress to which a plant is exposed which does not result in the plant ceasing to grow altogether without the capacity to resume growth. Mild stress in the sense of the invention leads to a reduction in the growth of the stressed plants of less than 40%, 35% or 30%, preferably less than 25%, 20% or 15%, more preferably less than 14%, 13%, 12%, 11% or 10% or less in comparison to the control plant under non-stress conditions. Due to advances in agricultural practices (irrigation, fertilization, pesticide treatments) severe stresses are not often encountered in cultivated crop plants. As a consequence, the compromised growth induced by mild stress is often an undesirable feature for agriculture. Mild stresses are the everyday biotic and/or abiotic (environmental) stresses to which a plant is exposed. Abiotic stresses may be due to drought or excess water, anaerobic stress, salt stress, chemical toxicity, oxidative stress and hot, cold or freezing temperatures. The abiotic stress may be an osmotic stress caused by a water stress (particularly due to drought), salt stress, oxidative stress or an ionic stress. Biotic stresses are typically those stresses caused by pathogens, such as bacteria, viruses, fungi and insects.

[0366] In particular, the methods of the present invention may be performed under non-stress conditions or under conditions of mild drought to give plants having increased yield relative to control plants. As reported in Wang et al. (Planta (2003) 218: 1-14), abiotic stress leads to a series of morphological, physiological, biochemical and molecular changes that adversely affect plant growth and productivity. Drought, salinity, extreme temperatures and oxidative stress are known to be interconnected and may induce growth and cellular damage through similar mechanisms. Rabbani et al. (Plant Physiol (2003) 133: 1755-1767) describes a particularly high degree of “cross talk” between drought stress and high-salinity stress. For example, drought and/or salinisation are manifested primarily as osmotic stress, resulting in the disruption of homeostasis and ion distribution in the cell. Oxidative stress, which frequently accompanies high or low temperature, salinity or drought stress, may cause denaturing of functional and structural proteins. As a consequence, these diverse environmental stresses often activate similar cell signaling pathways and cellular responses, such as the production of stress proteins, up-regulation of anti-oxidants, accumulation of compatible solutes and growth arrest. The term “non-stress” conditions as used herein are those environmental conditions that allow optimal growth of plants. Persons skilled in the art are aware of normal soil conditions and climatic conditions for a given location.

[0367] Performance of the methods of the invention gives plants grown under non-stress conditions or under mild drought conditions increased yield relative to suitable control plants grown under comparable conditions. Therefore, according to the present invention, there is provided a method for increasing yield in plants grown under non-stress conditions or under mild drought conditions, which method comprises increasing expression in a plant of a nucleic acid encoding a SAP-like polypeptide.

[0368] The present invention encompasses plants or parts thereof (including seeds) obtainable by the methods according to the present invention. The plants or parts thereof comprise a nucleic acid transgene encoding a SAP-like polypeptide as defined above.

[0369] The invention also provides genetic constructs and vectors to facilitate introduction and/or expression in plants of nucleic acids encoding SAP-like polypeptides. The gene constructs may be inserted into vectors, which may be commercially available, suitable for transforming into plants and suitable for expression of the gene of interest in the transformed cells. The invention also provides use of a gene construct as defined herein in the methods of the invention.

[0370] More specifically, the present invention provides a construct comprising:
[0371] (a) a nucleic acid encoding a SAP-like polypeptide as defined above;
[0372] (b) one or more control sequences capable of driving expression of the nucleic acid sequence of (a); and optionally
[0373] (c) a transcription termination sequence.

[0374] The term “control sequence” and “termination sequence” are as defined herein.

[0375] Plants are transformed with a vector comprising any of the nucleic acids described above. The skilled artisan is well aware of the genetic elements that must be present on the vector in order to successfully transform, select and propagate host cells containing the sequence of interest. The sequence of interest is operably linked to one or more control sequences (at least to a promoter).

[0376] Advantageously, any type of promoter may be used to drive expression of the nucleic acid sequence. A constitutive promoter is particularly useful in the methods, as is a tissue-specific promoter. In particular, the tissue-specific promoter is a root-specific promoter or a young green tissue-specific promoter. See the “Definitions” section herein for definitions of the various promoter types. It should be clear that the applicability of the present invention is not restricted to the SAP-like polypeptide-encoding nucleic acid represented by SEQ ID NO: 210, nor is the applicability of the invention restricted to expression of a SAP-like polypeptide-encoding nucleic acid when driven by a constitutive promoter, a root-specific promoter or a young green tissue-specific promoter.

[0377] The young green tissue-specific promoter is preferably a protochlorophyllide reductase (PcR) promoter. Examples of other young green tissue-specific promoters which may also be used to drive expression of a SAP-like-encoding nucleic acid are shown in Table 6 in the “Definitions” section herein. The constitutive promoter is preferably a GOS2 promoter, preferably a GOS2 promoter from rice. See Table 6 in the “Definitions” section herein for further examples of constitutive promoters. The root-specific promoter is preferably an RCC3 promoter, preferably an RCC3 promoter (Plant Mol Biol. 1995 January; 27(2):237-48), more preferably an RCC3 promoter from rice, further preferably as represented by a nucleic acid sequence substantially similar to SEQ ID NO: 246, most preferably the promoter is as represented by SEQ ID NO: 246. See the “Definitions” section for further examples of root-specific promoters.

[0378] For the identification of functionally equivalent promoters, the promoter strength and/or expression pattern of a candidate promoter may be analysed for example by operably linking the promoter to a reporter gene and assaying the expression level and pattern of the reporter gene in various tissues of the plant. Suitable well-known reporter genes include for example beta-glucuronidase or beta galactosidase. The promoter activity is assayed by measuring the enzymatic activity of the beta-glucuronidase or beta-galactosidase. The promoter strength and/or expression pattern may then be compared to that of a reference promoter (such as the one used in the methods of the present invention). Alternatively, promoter strength may be assayed by quantifying mRNA levels or by comparing mRNA levels of the nucleic acid used in the methods of the present invention, with mRNA levels of housekeeping genes such as 18S rRNA, using methods known in the art, such as Northern blotting with densitometric analysis of autoradiograms, quantitative real-time PCR or RT-PCR (Heid et al., 1996 Genome Methods 6: 986-994). Generally by “weak promoter” is intended a promoter that drives expression of a coding sequence at a low level. By “low level” is intended at levels of about 1/10,000 transcripts to about 1/100,000 transcripts, to about 1/500,0000 transcripts per cell. Conversely, a “strong promoter” drives expression of a coding sequence at high level, or at about 1/10 transcripts to about 1/100 transcripts to about 1/1,000 transcripts per cell.

[0379] Optionally, one or more terminator sequences may be used in the construct introduced into a plant. Additional regulatory elements may include transcriptional as well as translational enhancers. Those skilled in the art will be aware of terminator and enhancer sequences that may be suitable for use in performing the invention. Such sequences would be known or may readily be obtained by a person skilled in the art.

[0380] An intron sequence may also be added to the 5′ untranslated region (UTR) or in the coding sequence to increase the amount of the mature message that accumulates in the cytosol. Inclusion of a spliceable intron in the transcription unit in both plant and animal expression constructs has been shown to increase gene expression at both the mRNA and protein levels up to 1000-fold (Buchman and Berg, Mol. Cell Biol. 8:4395-4405 (1988); Callis et al., Genes Dev. 1:1183-1200 (1987)). Such intron enhancement of gene expression is typically greatest when placed near the 5′ end of the transcription unit. Use of the maize introns Adh1-S intron 1, 2, and 6, the Bronze-1 intron are known in the art. For general information, see The Maize Handbook, Chapter 116, Freeling and Walbot, Eds., Springer, N.Y. (1994).

[0381] Other control sequences (besides promoter, enhancer, silencer, intron sequences, 3′UTR and/or 5′UTR regions) may be protein and/or RNA stabilizing elements. Such sequences would be known or may readily be obtained by a person skilled in the art.

[0382] The genetic constructs of the invention may further include an origin of replication sequence that is required for maintenance and/or replication in a specific cell type. One example is when a genetic construct is required to be maintained in a bacterial cell as an episomal genetic element (e.g. plasmid or cosmid molecule). Preferred origins of replication include, but are not limited to, the f1-ori and colE1.

[0383] For the detection of the successful transfer of the nucleic acid sequences as used in the methods of the invention and/or selection of transgenic plants comprising these nucleic acids, it is advantageous to use marker genes (or reporter genes). Therefore, the genetic construct may optionally comprise a selectable marker gene. Selectable markers are described in more detail in the “definitions” section herein.

[0384] It is known that upon stable or transient integration of nucleic acids into plant cells, only a minority of the cells takes up the foreign DNA and, if desired, integrates it into its genome, depending on the expression vector used and the transfection technique used. To identify and select these integrants, a gene coding for a selectable marker (such as the ones described above) is usually introduced into the host cells together with the gene of interest. These markers can for example be used in mutants in which these genes are not functional by, for example, deletion by conventional methods. Furthermore, nucleic acid molecules encoding a selectable marker can be introduced into a host cell on the same vector that comprises the sequence encoding the polypeptides of the invention or used in the methods of the invention, or else in a separate vector. Cells which have been stably transfected with the introduced nucleic acid can be identified for example by selection (for example, cells which have integrated the selectable marker survive whereas the other cells die).

[0385] Since the marker genes, particularly genes for resistance to antibiotics and herbicides, are no longer required or are undesired in the transgenic host cell once the nucleic acids have been introduced successfully, the process according to the invention for introducing the nucleic acids advantageously employs techniques which enable the removal or excision of these marker genes. One such a method is what is known as co-transformation. The co-transformation method employs two vectors simultaneously for the transformation, one vector bearing the nucleic acid according to the invention and a second bearing the marker gene(s). A large proportion of transformants receives or, in the case of plants, comprises (up to 40% or more of the transformants), both vectors. In case of transformation with Agrobacteria, the transformants usually receive only a part of the vector, i.e. the sequence flanked by the T-DNA, which usually represents the expression cassette. The marker genes can subsequently be removed from the transformed plant by performing crosses. In another method, marker genes integrated into a transposon are used for the transformation together with desired nucleic acid (known as the Ac/Ds technology). The transformants can be crossed with a transposase source or the transformants are transformed with a nucleic acid construct conferring expression of a transposase, transiently or stable. In some cases (approx. 10%), the transposon jumps out of the genome of the host cell once transformation has taken place successfully and is lost. In a further number of cases, the transposon jumps to a different location. In these cases the marker gene must be eliminated by performing crosses. In microbiology, techniques were developed which make possible, or facilitate, the detection of such events. A further advantageous method relies on what is known as recombination systems; whose advantage is that elimination by crossing can be dispensed with. The best-known system of this type is what is known as the Cre/lox system. Cre1 is a recombinase that removes the sequences located between the loxP sequences. If the marker gene is integrated between the loxP sequences, it is removed once transformation has taken place successfully, by expression of the recombinase. Further recombination systems are the HIN/HIX, FLP/FRT and REP/STB system (Tribble et al., J. Biol. Chem., 275, 2000: 22255-22267; Velmurugan et al., J. Cell Biol., 149, 2000: 553-566). A site-specific integration into the plant genome of the nucleic acid sequences according to the invention is possible. Naturally, these methods can also be applied to microorganisms such as yeast, fungi or bacteria.

[0386] The invention also provides a method for the production of transgenic plants having enhanced yield-related traits relative to control plants, comprising introduction and expression in a plant of any nucleic acid encoding a SAP-like polypeptide as defined hereinabove.

[0387] More specifically, the present invention provides a method for the production of transgenic plants having increased yield, which method comprises:
[0388] (i) introducing and expressing in a plant or plant cell a SAP-like polypeptide-encoding nucleic acid; and
[0389] (ii) cultivating the plant cell under conditions promoting plant growth and development.

[0390] The nucleic acid may be introduced directly into a plant cell or into the plant itself (including introduction into a tissue, organ or any other part of a plant). According to a preferred feature of the present invention, the nucleic acid is preferably introduced into a plant by transformation. The term “transformation” is described in more detail in the “definitions” section herein.

[0391] The genetically modified plant cells can be regenerated via all methods with which the skilled worker is familiar. Suitable methods can be found in the abovementioned publications by S. D. Kung and R. Wu, Potrykus or Höfgen and Willmitzer.

[0392] Generally after transformation, plant cells or cell groupings are selected for the presence of one or more markers which are encoded by plant-expressible genes co-transferred with the gene of interest, following which the transformed material is regenerated into a whole plant. To select transformed plants, the plant material obtained in the transformation is, as a rule, subjected to selective conditions so that transformed plants can be distinguished from untransformed plants. For example, the seeds obtained in the above-described manner can be planted and, after an initial growing period, subjected to a suitable selection by spraying. A further possibility consists in growing the seeds, if appropriate after sterilization, on agar plates using a suitable selection agent so that only the transformed seeds can grow into plants. Alternatively, the transformed plants are screened for the presence of a selectable marker such as the ones described above.

[0393] Following DNA transfer and regeneration, putatively transformed plants may also be evaluated, for instance using Southern analysis, for the presence of the gene of interest, copy number and/or genomic organisation. Alternatively or additionally, expression levels of the newly introduced DNA may be monitored using Northern and/or Western analysis, both techniques being well known to persons having ordinary skill in the art.

[0394] The generated transformed plants may be propagated by a variety of means, such as by clonal propagation or classical breeding techniques. For example, a first generation (or T1) transformed plant may be selfed and homozygous second-generation (or T2) transformants selected, and the T2 plants may then further be propagated through classical breeding techniques.

[0395] The generated transformed organisms may take a variety of forms. For example, they may be chimeras of transformed cells and non-transformed cells; clonal transformants (e.g., all cells transformed to contain the expression cassette); grafts of transformed and untransformed tissues (e.g., in plants, a transformed rootstock grafted to an untransformed scion).

[0396] The present invention clearly extends to any plant cell or plant produced by any of the methods described herein, and to all plant parts and propagules thereof. The present invention extends further to encompass the progeny of a primary transformed or transfected cell, tissue, organ or whole plant that has been produced by any of the aforementioned methods, the only requirement being that progeny exhibit the same genotypic and/or phenotypic characteristic(s) as those produced by the parent in the methods according to the invention.

[0397] The invention also includes host cells containing an isolated nucleic acid encoding a SAP-like polypeptide as defined hereinabove. Preferred host cells according to the invention are plant cells. Host plants for the nucleic acids or the vector used in the method according to the invention, the expression cassette or construct or vector are, in principle, advantageously all plants, which are capable of synthesizing the polypeptides used in the inventive method.

[0398] The methods of the invention are advantageously applicable to any plant.

[0399] Plants that are particularly useful in the methods of the invention include all plants which belong to the superfamily Viridiplantae, in particular monocotyledonous and dicotyledonous plants including fodder or forage legumes, ornamental plants, food crops, trees or shrubs. According to a preferred embodiment of the present invention, the plant is a crop plant. Examples of crop plants include soybean, sunflower, canola, alfalfa, rapeseed, cotton, tomato, potato and tobacco. Further preferably, the plant is a monocotyledonous plant. Examples of monocotyledonous plants include sugarcane. More preferably the plant is a cereal. Examples of cereals include rice, maize, wheat, barley, millet, rye, sorghum and oats.

[0400] The invention also extends to harvestable parts of a plant such as, but not limited to seeds, leaves, fruits, flowers, stems, rhizomes, tubers and bulbs. The invention furthermore relates to products derived, preferably directly derived, from a harvestable part of such a plant, such as dry pellets or powders, oil, fat and fatty acids, starch or proteins.

[0401] According to a preferred feature of the invention, the modulated expression is increased expression. Methods for increasing expression of nucleic acids or genes, or gene products, are well documented in the art and include, for example, overexpression driven by appropriate promoters, the use of transcription enhancers or translation enhancers. Isolated nucleic acids which serve as promoter or enhancer elements may be introduced in an appropriate position (typically upstream) of a non-heterologous form of a polynucleotide so as to upregulate expression. For example, endogenous promoters may be altered in vivo by mutation, deletion, and/or substitution (see, Kmiec, U.S. Pat. No. 5,565,350; Zarling et al., PCT/US93/03868), or isolated promoters may be introduced into a plant cell in the proper orientation and distance from a gene of the present invention so as to control the expression of the gene.

[0402] If polypeptide expression is desired, it is generally desirable to include a polyadenylation region at the 3′-end of a polynucleotide coding region. The polyadenylation region can be derived from the natural gene, from a variety of other plant genes, or from T-DNA. The 3′ end sequence to be added may be derived from, for example, the nopaline synthase or octopine synthase genes, or alternatively from another plant gene, or less preferably from any other eukaryotic gene.

[0403] As mentioned above, a preferred method for modulating (preferably, increasing) expression of a nucleic acid encoding a SAP-like polypeptide is by introducing and expressing in a plant a nucleic acid encoding a SAP-like polypeptide; however the effects of performing the method, i.e. enhancing yield-related traits may also be achieved using other well known techniques. A description of some of these techniques will now follow.

[0404] One such technique is T-DNA activation tagging (Hayashi et al. Science (1992) 1350-1353), which involves insertion of T-DNA, usually containing a promoter (may also be a translation enhancer or an intron), in the genomic region of the gene of interest or 10 kb up- or downstream of the coding region of a gene in a configuration such that the promoter directs expression of the targeted gene. Typically, regulation of expression of the targeted gene by its natural promoter is disrupted and the gene falls under the control of the newly introduced promoter. The promoter is typically embedded in a T-DNA. This T-DNA is randomly inserted into the plant genome, for example, through Agrobacterium infection and leads to modified expression of genes near the inserted T-DNA. The resulting transgenic plants show dominant phenotypes due to modified expression of genes close to the introduced promoter.

[0405] The effects of the invention may also be reproduced using the technique of TILLING (Targeted Induced Local Lesions In Genomes); for a description of the same see the “definitions” section.

[0406] The effects of the invention may also be reproduced using homologous recombination; for a description of the same see the “definitions” section.

[0407] The present invention also encompasses use of nucleic acids encoding SAP-like polypeptides as described herein and use of these SAP-like polypeptide in enhancing any of the aforementioned yield-related traits in plants.

[0408] Nucleic acids encoding SAP-like polypeptide described herein, or the SAP-like polypeptides themselves, may find use in breeding programmes in which a DNA marker is identified which may be genetically linked to a SAP-like polypeptide-encoding gene. The nucleic acids/genes, or the SAP-like polypeptides themselves may be used to define a molecular marker. This DNA or protein marker may then be used in breeding programmes to select plants having enhanced yield-related traits as defined hereinabove in the methods of the invention.

[0409] Allelic variants of a SAP-like polypeptide-encoding nucleic acid/gene may also find use in marker-assisted breeding programmes. Such breeding programmes sometimes require introduction of allelic variation by mutagenic treatment of the plants, using for example EMS mutagenesis; alternatively, the programme may start with a collection of allelic variants of so called “natural” origin caused unintentionally. Identification of allelic variants then takes place, for example, by PCR. This is followed by a step for selection of superior allelic variants of the sequence in question and which give increased yield. Selection is typically carried out by monitoring growth performance of plants containing different allelic variants of the sequence in question. Growth performance may be monitored in a greenhouse or in the field. Further optional steps include crossing plants in which the superior allelic variant was identified with another plant. This could be used, for example, to make a combination of interesting phenotypic features.

[0410] Nucleic acids encoding SAP-like polypeptides may also be used as probes for genetically and physically mapping the genes that they are a part of, and as markers for traits linked to those genes. Such information may be useful in plant breeding in order to develop lines with desired phenotypes. Such use of SAP-like polypeptide-encoding nucleic acids requires only a nucleic acid sequence of at least 15 nucleotides in length. The SAP-like polypeptide-encoding nucleic acids may be used as restriction fragment length polymorphism (RFLP) markers. Southern blots (Sambrook J, Fritsch E F and Maniatis T (1989) Molecular Cloning, A Laboratory Manual) of restriction-digested plant genomic DNA may be probed with the SAP-like-encoding nucleic acids. The resulting banding patterns may then be subjected to genetic analyses using computer programs such as MapMaker (Lander et al. (1987) Genomics 1: 174-181) in order to construct a genetic map. In addition, the nucleic acids may be used to probe Southern blots containing restriction endonuclease-treated genomic DNAs of a set of individuals representing parent and progeny of a defined genetic cross. Segregation of the DNA polymorphisms is noted and used to calculate the position of the SAP-like polypeptide-encoding nucleic acid in the genetic map previously obtained using this population (Botstein et al. (1980) Am. J. Hum. Genet. 32:314-331).

[0411] The production and use of plant gene-derived probes for use in genetic mapping is described in Bernatzky and Tanksley (1986) Plant Mol. Biol. Reporter 4: 37-41. Numerous publications describe genetic mapping of specific cDNA clones using the methodology outlined above or variations thereof. For example, F2 intercross populations, backcross populations, randomly mated populations, near isogenic lines, and other sets of individuals may be used for mapping. Such methodologies are well known to those skilled in the art.

[0412] The nucleic acid probes may also be used for physical mapping (i.e., placement of sequences on physical maps; see Hoheisel et al. In: Non-mammalian Genomic Analysis: A Practical Guide, Academic press 1996, pp. 319-346, and references cited therein).

[0413] In another embodiment, the nucleic acid probes may be used in direct fluorescence in situ hybridisation (FISH) mapping (Trask (1991) Trends Genet. 7:149-154). Although current methods of FISH mapping favour use of large clones (several kb to several hundred kb; see Laan et al. (1995) Genome Res. 5:13-20), improvements in sensitivity may allow performance of FISH mapping using shorter probes.

[0414] A variety of nucleic acid amplification-based methods for genetic and physical mapping may be carried out using the nucleic acids. Examples include allele-specific amplification (Kazazian (1989) J. Lab. Clin. Med 11:95-96), polymorphism of PCR-amplified fragments (CAPS; Sheffield et al. (1993) Genomics 16:325-332), allele-specific ligation (Landegren et al. (1988) Science 241:1077-1080), nucleotide extension reactions (Sokolov (1990) Nucleic Acid Res. 18:3671), Radiation Hybrid Mapping (Walter et al. (1997) Nat. Genet. 7:22-28) and Happy Mapping (Dear and Cook (1989) Nucleic Acid Res. 17:6795-6807). For these methods, the sequence of a nucleic acid is used to design and produce primer pairs for use in the amplification reaction or in primer extension reactions. The design of such primers is well known to those skilled in the art. In methods employing PCR-based genetic mapping, it may be necessary to identify DNA sequence differences between the parents of the mapping cross in the region corresponding to the instant nucleic acid sequence. This, however, is generally not necessary for mapping methods.

[0415] The methods according to the present invention result in plants having enhanced yield-related traits, as described hereinbefore. These traits may also be combined with other economically advantageous traits, such as further yield-enhancing traits, tolerance to other abiotic and biotic stresses, traits modifying various architectural features and/or biochemical and/or physiological features.

### (iv) SYPF1

[0416] Surprisingly, it has now been found that modulating expression in a plant of a nucleic acid encoding a SYPF1 polypeptide gives plants having enhanced yield-related traits relative to control plants.

[0417] According to a first embodiment, the present invention provides a method for enhancing yield-related traits in plants relative to control plants, comprising modulating expression in a plant of a nucleic acid encoding a SYPF1 polypeptide.

[0418] A preferred method for modulating (preferably, increasing) expression of a nucleic acid encoding a SYPF1 polypeptide is by introducing and expressing in a plant a nucleic acid encoding a SYPF1 polypeptide.

[0419] Any reference hereinafter to a “protein useful in the methods of the invention” is taken to mean a SYPF1 polypeptide as defined herein. Any reference hereinafter to a “nucleic acid useful in the methods of the invention” is taken to mean a nucleic acid capable of encoding such a SYPF1 polypeptide. The nucleic acid to be introduced into a plant (and therefore useful in performing the methods of the invention) is any nucleic acid encoding the type of protein which will now be described, hereafter also named “SYPF1 nucleic acid” or “SYPF1 gene”.

[0420] A “SYPF1 polypeptide” as defined herein refers to any polypeptide having, in increasing order of preference, at least 40%, 45%, 50%, 55%, 60%, 65%, 70%, 75%, 80%, 85%, 90%, 95% or more sequence identity to any one, preferably to any two, most preferably to all three of Motifs I, II and III as shown in the alignment of FIG. 19. The boxed regions represent conserved regions or motifs found in SYPF1 polypeptides.

[0421] A SYPF1 polypeptide may comprise any one, preferably any two, most preferably all three of Motifs I, II and III as shown in the alignment of FIG. 19, which Motifs comprise any conservative amino acid change at any position.

[0422] A SYPF1 polypeptide may comprise any one, preferably any two, most preferably all three of Motifs I, II and III as shown in the alignment of FIG. 19.

[0423] The Motifs are preferably as found in the sequence of SEQ ID NO: 322 or in the corresponding rice orthologue (SEQ ID NO: 336), i.e.

Motif 1:
SLVSNFLSHYLQYYEEKS (as found in SEQ ID NO: 322)
RLVNRVLGHYEHYYRTK (as found in SEQ ID NO: 336)

[0424] The Motifs may comprise any conservative amino acid change at any position.
[0425] The Motifs may comprise between one and nine non-conservative amino acid changes at any position.

Motif 2:
PPWLSSYEKLILWIGGFKP (as found in SEQ ID NO: 322)
PSWTSTTENLYLWCGGWRP (as found in SEQ ID NO: 336)

[0426] The Motifs may comprise any conservative amino acid change at any position.
[0427] The Motifs may comprise between one and ten non-conservative amino acid changes at any position.

Motif 3:
NADQLRCVTVGKVVEVLNPRQSIKLLRA (as found in SEQ ID
NO: 322)
MADGLRLETMREVVALLRPSQAVHFLIA (as found in SEQ ID
NO: 336)

[0428] The Motifs may comprise any conservative amino acid change at any position.
[0429] The Motifs may comprise between one and fourteen non-conservative amino acid changes at any position.

[0430] Additionally or alternatively, the “SYPF1 polypeptide” as defined herein comprises in increasing order of preference at least 45%, 50%, 55%, 60%, 65%, 70%, 75%, 80%, 85%, 90%, 95% or more sequence identity to the SYPF1 polypeptide represented by SEQ ID NO: 322 or to any of the amino acid sequences given in Table E1 herein.

[0431] Furthermore, SYPF1 polypeptides (at least in their native form) may have DNA-binding activity. Tools and techniques for measuring DNA-binding activity are well known in the art.

[0432] The terms “domain” and “motif” are defined in the “definitions” section herein. Specialist databases exist for the identification of domains, for example, SMART (Schultz et al. (1998) Proc. Natl. Acad. Sci. USA 95, 5857-5864; Letunic et al. (2002) Nucleic Acids Res 30, 242-244, InterPro (Mulder et al., (2003) Nucl. Acids. Res. 31, 315-318, Prosite (Bucher and Bairoch (1994), A generalized profile syntax for biomolecular sequences motifs and its function in automatic sequence interpretation. (In) ISMB-94; Proceedings 2nd International Conference on Intelligent Systems for Molecular Biology. Altman R., Brutlag D., Karp P., Lathrop R., Searls D., Eds., pp 53-61, AAAIPress, Menlo Park; Hulo et al., Nucl. Acids. Res. 32:D134-D137, (2004), or Pfam (Bateman et al., Nucleic Acids Research 30(1): 276-280 (2002). A set of tools for in silico analysis of protein sequences is available on the ExPASY proteomics server (hosted by the Swiss Institute of Bioinformatics (Gasteiger et al., ExPASy: the proteomics server for in-depth protein knowledge and analysis, Nucleic Acids Res. 31:3784-3788 (2003)). Domains may also be identified using routine techniques, such as by sequence alignment.

[0433] Analysis of the polypeptide sequence of SEQ ID NO: 322 in the SMART database, revealed there to be four domains of so-called intrinsic disorder (See FIG. 18). These domains are R-, K-, S-rich and may point to a role in protein-protein interactions. The four domains are:

1^{st} Domain of intrinsic disorder:
MPNTSSSQSF
2^{nd} Domain of intrinsic disorder:
VSVADLTRHQKDRISSLKSETRRKEREV
3^{rd} Domain of intrinsic disorder:
LVQQSVADPPVM
4^{th} Domain of intrinsic disorder:
HLRLRDRDQERA

[0434] Such domains of intrinsic disorder may also be found in the corresponding rice orthologue of SEQ ID NO: 336 (NP_{—}909348)

1^{st} Domain of intrinsic disorder:
PPPSPHPPH
2^{nd} Domain of intrinsic disorder:
SRDLAALRSAASAATNPAAPPDDA
3^{rd} Domain of intrinsic disorder:
LAGGGLGAGDLGDL
4^{th} Domain of intrinsic disorder:
ELAGGGGMDAEGMEMEM

[0435] Furthermore, analysis of the polypeptide sequence of SEQ ID NO: 322 in the PRODOM database revealed there to be similarity to: tumour related At4g18650; TGA1 bzip activator coil coil.

[0436] Furthermore, SYPF1 polypeptides comprise F-rich (phenylalanine-rich) and C-rich (cysteine-rich) regions. These regions are highlighted in FIG. 18 showing the sequence of SEQ ID NO: 322.

[0437] Methods for the alignment of sequences for comparison are well known in the art, such methods include GAP, BESTFIT, BLAST, FASTA and TFASTA. GAP uses the algorithm of Needleman and Wunsch ((1970) J Mol Biol 48: 443-453) to find the global (i.e. spanning the complete sequences) alignment of two sequences that maximizes the number of matches and minimizes the number of gaps. The BLAST algorithm (Altschul et al. (1990) J Mol Biol 215: 403-10) calculates percent sequence identity and performs a statistical analysis of the similarity between the two sequences. The software for performing BLAST analysis is publicly available through the National Centre for Biotechnology Information (NCBI). Homologues may readily be identified using, for example, the ClustalW multiple sequence alignment algorithm (version 1.83), with the default pairwise alignment parameters, and a scoring method in percentage. Global percentages of similarity and identity may also be determined using one of the methods available in the MatGAT software package (Campanella et al., BMC Bioinformatics. 2003 Jul. 10; 4:29. MatGAT: an application that generates similarity/identity matrices using protein or DNA sequences.). Minor manual editing may be performed to optimise alignment between conserved motifs, as would be apparent to a person skilled in the art. Furthermore, instead of using full-length sequences for the identification of homologues, specific domains may also be used. The sequence identity values, which are indicated below in the Examples section herein as a percentage were determined over the entire nucleic acid or amino acid sequence, and/or over selected domains or conserved motif(s), using the programs mentioned above using the default parameters.

[0438] The present invention is illustrated by transforming plants with the nucleic acid sequence represented by SEQ ID NO: 321, encoding the polypeptide sequence of SEQ ID NO: 322. However, performance of the invention is not restricted to these sequences; the methods of the invention may advantageously be performed using any SYPF1-encoding nucleic acid or SYPF1 polypeptides as defined herein.

[0439] Examples of nucleic acids encoding SYPF1 polypeptides are given in Table E1 herein. Such nucleic acids are useful in performing the methods of the invention. The amino acid sequences given in Table E1 are example sequences of orthologues and paralogues of the SYPF1 polypeptides represented by SEQ ID NO: 322, the terms “orthologues” and “paralogues” being as defined herein. Further orthologues and paralogues may readily be identified by performing a so-called reciprocal blast search. Typically, this involves a first BLAST involving BLASTing a query sequence (for example using any of the sequences listed in Table E1) against any sequence database, such as the publicly available NCBI database. BLASTN or TBLASTX (using standard default values) are generally used when starting from a nucleotide sequence, and BLASTP or TBLASTN (using standard default values) when starting from a protein sequence. The BLAST results may optionally be filtered. The full-length sequences of either the filtered results or non-filtered results are then BLASTed back (second BLAST) against sequences from the organism from which the query sequence is derived (where the query sequence is SEQ ID NO: 321 or SEQ ID NO: 322, the second BLAST would therefore be against Arabidopsis sequences). The results of the first and second BLASTs are then compared. A paralogue is identified if a high-ranking hit from the first blast is from the same species as from which the query sequence is derived, a BLAST back then ideally results in the query sequence amongst the highest hits; an orthologue is identified if a high-ranking hit in the first BLAST is not from the same species as from which the query sequence is derived, and preferably results upon BLAST back in the query sequence being among the highest hits.

[0440] High-ranking hits are those having a low E-value. The lower the E-value, the more significant the score (or in other words the lower the chance that the hit was found by chance). Computation of the E-value is well known in the art. In addition to E-values, comparisons are also scored by percentage identity. Percentage identity refers to the number of identical nucleotides (or amino acids) between the two compared nucleic acid (or polypeptide) sequences over a particular length. In the case of large families, ClustalW may be used, followed by a neighbour joining tree, to help visualize clustering of related genes and to identify orthologues and paralogues.

[0441] Nucleic acid variants may also be useful in practising the methods of the invention. Examples of such variants include nucleic acids encoding homologues and derivatives of any one of the amino acid sequences given in Table E1, the terms “homologue” and “derivative” being as defined herein. Also useful in the methods of the invention are nucleic acids encoding homologues and derivatives of orthologues or paralogues of any one of the amino acid sequences given in Table E1. Homologues and derivatives useful in the methods of the present invention have substantially the same biological and functional activity as the unmodified protein from which they are derived.

[0442] Further nucleic acid variants useful in practising the methods of the invention include portions of nucleic acids encoding SYPF1 polypeptides, nucleic acids hybridising to nucleic acids encoding SYPF1 polypeptides, splice variants of nucleic acids encoding SYPF1 polypeptides, allelic variants of nucleic acids encoding SYPF1 polypeptides and variants of nucleic acids encoding SYPF1 polypeptides obtained by gene shuffling. The terms hybridising sequence, splice variant, allelic variant and gene shuffling are as described herein.

[0443] Nucleic acids encoding SYPF1 polypeptides need not be full-length nucleic acids, since performance of the methods of the invention does not rely on the use of full-length nucleic acid sequences. According to the present invention, there is provided a method for enhancing yield-related traits in plants, comprising introducing and expressing in a plant a portion of any one of the nucleic acid sequences given in Table E1, or a portion of a nucleic acid encoding an orthologue, paralogue or homologue of any of the amino acid sequences given in Table E1.

[0444] A portion of a nucleic acid may be prepared, for example, by making one or more deletions to the nucleic acid. The portions may be used in isolated form or they may be fused to other coding (or non-coding) sequences in order to, for example, produce a protein that combines several activities. When fused to other coding sequences, the resultant polypeptide produced upon translation may be bigger than that predicted for the protein portion.

[0445] Portions useful in the methods of the invention, encode a SYPF1 polypeptides as defined herein, and have substantially the same biological activity as the amino acid sequences given in Table E1. Preferably, the portion is a portion of any one of the nucleic acids given in Table E1, or is a portion of a nucleic acid encoding an orthologue or paralogue of any one of the amino acid sequences given in Table E1. Preferably the portion is, in increasing order of preference at least 300, 400, 500 or 600 consecutive nucleotides in length, the consecutive nucleotides being of any one of the nucleic acid sequences given in Table E1, or of a nucleic acid encoding an orthologue or paralogue of any one of the amino acid sequences given in Table E1. Most preferably the portion is a portion of the nucleic acid of SEQ ID NO: 321. Preferably, the portion encodes an amino acid sequence comprising (any one or more of the domains or motifs defined herein). Preferably, the portion encodes an amino acid sequence which when used in the construction of a phylogenetic tree, such as the one depicted in FIG. 20, tends to cluster with the group of SYPF1 polypeptides comprising the amino acid sequence represented by SEQ ID NO: 322 rather than with any other group.

[0446] Another nucleic acid variant useful in the methods of the invention is a nucleic acid capable of hybridising, under reduced stringency conditions, preferably under stringent conditions, with a nucleic acid encoding a SYPF1 polypeptide as defined herein, or with a portion as defined herein.

[0447] According to the present invention, there is provided a method for enhancing yield-related traits in plants, comprising introducing and expressing in a plant a nucleic acid capable of hybridizing to any one of the nucleic acids given in Table E1, or comprising introducing and expressing in a plant a nucleic acid capable of hybridising to a nucleic acid encoding an orthologue, paralogue or homologue of any of the nucleic acid sequences given in Table E1.

[0448] Hybridising sequences useful in the methods of the invention encode a SYPF1 polypeptide as defined herein, and have substantially the same biological activity as the amino acid sequences given in Table E1. Preferably, the hybridising sequence is capable of hybridising to any one of the nucleic acids given in Table E1, or to a portion of any of these sequences, a portion being as defined above, or wherein the hybridising sequence is capable of hybridising to a nucleic acid encoding an orthologue or paralogue of any one of the amino acid sequences given in Table E1. Most preferably, the hybridising sequence is capable of hybridising to a nucleic acid as represented by SEQ ID NO: 321 or to a portion thereof. Preferably, the hybridising sequence encodes an amino acid sequence comprising any one or more of the motifs or domains as defined herein. Preferably, the hybridising sequence encodes an amino acid sequence which when used in the construction of a phylogenetic tree, such as the one depicted in FIG. 20, tends to cluster with the group of SYPF1 polypeptides comprising the amino acid sequence represented by SEQ ID NO: 322 rather than with any other group.

[0449] Another nucleic acid variant useful in the methods of the invention is a splice variant encoding a SYPF1 polypeptide as defined hereinabove, a splice variant being as defined herein.

[0450] According to the present invention, there is provided a method for enhancing yield-related traits in plants, comprising introducing and expressing in a plant a splice variant of any one of the nucleic acid sequences given in Table E1, or a splice variant of a nucleic acid encoding an orthologue, paralogue or homologue of any of the amino acid sequences given in Table E1.

[0451] Preferred splice variants are splice variants of a nucleic acid represented by SEQ ID NO: 321, or a splice variant of a nucleic acid encoding an orthologue or paralogue of SEQ ID NO: 322. Preferably, the amino acid sequence encoded by the splice variant comprises any one or more of the motifs or domains as defined herein. Preferably, the amino acid sequence encoded by the splice variant, when used in the construction of a phylogenetic tree, such as the one depicted in FIG. 20, tends to cluster with the group of SYPF1 polypeptides comprising the amino acid sequence represented by SEQ ID NO: 322 rather than with any other group.

[0452] Another nucleic acid variant useful in performing the methods of the invention is an allelic variant of a nucleic acid encoding a SYPF1 polypeptide as defined hereinabove, an allelic variant being as defined herein.

[0453] According to the present invention, there is provided a method for enhancing yield-related traits in plants, comprising introducing and expressing in a plant an allelic variant of any one of the nucleic acids given in Table E1, or comprising introducing and expressing in a plant an allelic variant of a nucleic acid encoding an orthologue, paralogue or homologue of any of the amino acid sequences given in Table E1.

[0454] The allelic variants useful in the methods of the present invention have substantially the same biological activity as the SYPF1 polypeptide of SEQ ID NO: 322 and any of the amino acids depicted in Table D1. Allelic variants exist in nature, and encompassed within the methods of the present invention is the use of these natural alleles. Preferably, the allelic variant is an allelic variant of SEQ ID NO: 321 or an allelic variant of a nucleic acid encoding an orthologue or paralogue of SEQ ID NO: 322. Preferably, the amino acid encoded by the allelic variant comprises any one or more of the motifs or domains as defined herein. Preferably, the amino acid sequence encoded by the allelic variant, when used in the construction of a phylogenetic tree, such as the one depicted in FIG. 20, tends to cluster with the group of SYPF1 polypeptides comprising the amino acid sequence represented by SEQ ID NO: 322 rather than with any other group.

[0455] Gene shuffling or directed evolution may also be used to generate variants of nucleic acids encoding SYPF1 polypeptides as defined above; the term “gene shuffling” being as defined herein.

[0456] According to the present invention, there is provided a method for enhancing yield-related traits in plants, comprising introducing and expressing in a plant a variant of any one of the nucleic acid sequences given in Table E1, or comprising introducing and expressing in a plant a variant of a nucleic acid encoding an orthologue, paralogue or homologue of any of the amino acid sequences given in Table E1, which variant nucleic acid is obtained by gene shuffling.

[0457] Preferably, the variant nucleic acid obtained by gene shuffling encodes an amino acid sequence comprising any one or more of the motifs or domains as defined herein. Preferably, the amino acid sequence encoded by the variant nucleic acid obtained by gene shuffling, when used in the construction of a phylogenetic tree such as the one depicted in FIG. 20, tends to cluster with the group of SYPF1 polypeptides comprising the amino acid sequence represented by SEQ ID NO: 322 rather than with any other group.

[0458] Furthermore, nucleic acid variants may also be obtained by site-directed mutagenesis. Several methods are available to achieve site-directed mutagenesis, the most common being PCR based methods (Current Protocols in Molecular Biology. Wiley Eds.).

[0459] Nucleic acids encoding SYPF1 polypeptides may be derived from any natural or artificial source. The nucleic acid may be modified from its native form in composition and/or genomic environment through deliberate human manipulation. Preferably the SYPF1 polypeptide-encoding nucleic acid is from a plant, further preferably from a dicotyledonous plant, more preferably from the family Brassicaceae, more preferably from the genus Arabidopsis, most preferably from Arabidopsis thaliana.

[0460] Performance of the methods of the invention gives plants having enhanced yield-related traits. In particular, performance of the methods of the invention gives plants having increased yield, especially increased seed yield relative to control plants. The terms “yield” and “seed yield” are described in more detail in the “definitions” section herein.

[0461] Reference herein to enhanced yield-related traits is taken to mean an increase in biomass (weight) of one or more parts of a plant, which may include aboveground (harvestable) parts and/or (harvestable) parts below ground. In particular, such harvestable parts are seeds, and performance of the methods of the invention results in plants having increased seed yield relative to the seed yield of suitable control plants.

[0462] Taking corn as an example, a yield increase may be manifested as one or more of the following: increase in the number of plants established per hectare or acre, an increase in the number of ears per plant, an increase in the number of rows, number of kernels per row, kernel weight, thousand kernel weight, ear length/diameter, increase in the seed filling rate (which is the number of filled seeds divided by the total number of seeds and multiplied by 100), among others. Taking rice as an example, a yield increase may manifest itself as an increase in one or more of the following: number of plants per hectare or acre, number of panicles per plant, number of spikelets per panicle, number of flowers (florets) per panicle (which is expressed as a ratio of the number of filled seeds over the number of primary panicles), increase in the seed filling rate (which is the number of filled seeds divided by the total number of seeds and multiplied by 100), increase in thousand kernel weight, among others.

[0463] The present invention provides a method for increasing yield, especially seed yield of plants, relative to control plants, which method comprises modulating expression, preferably increasing expression, in a plant of a nucleic acid encoding a SYPF1 polypeptide as defined herein.

[0464] Since the transgenic plants according to the present invention have increased yield, it is likely that these plants exhibit an increased growth rate (during at least part of their life cycle), relative to the growth rate of control plants at a corresponding stage in their life cycle.

[0465] The increased growth rate may be specific to one or more parts of a plant (including seeds), or may be throughout substantially the whole plant. Plants having an increased growth rate may have a shorter life cycle. The life cycle of a plant may be taken to mean the time needed to grow from a dry mature seed up to the stage where the plant has produced dry mature seeds, similar to the starting material. This life cycle may be influenced by factors such as early vigour, growth rate, greenness index, flowering time and speed of seed maturation. The increase in growth rate may take place at one or more stages in the life cycle of a plant or during substantially the whole plant life cycle. Increased growth rate during the early stages in the life cycle of a plant may reflect enhanced vigour. The increase in growth rate may alter the harvest cycle of a plant allowing plants to be sown later and/or harvested sooner than would otherwise be possible (a similar effect may be obtained with earlier flowering time). If the growth rate is sufficiently increased, it may allow for the further sowing of seeds of the same plant species (for example sowing and harvesting of rice plants followed by sowing and harvesting of further rice plants all within one conventional growing period). Similarly, if the growth rate is sufficiently increased, it may allow for the further sowing of seeds of different plants species (for example the sowing and harvesting of corn plants followed by, for example, the sowing and optional harvesting of soybean, potato or any other suitable plant). Harvesting additional times from the same rootstock in the case of some crop plants may also be possible. Altering the harvest cycle of a plant may lead to an increase in annual biomass production per acre (due to an increase in the number of times (say in a year) that any particular plant may be grown and harvested). An increase in growth rate may also allow for the cultivation of transgenic plants in a wider geographical area than their wild-type counterparts, since the territorial limitations for growing a crop are often determined by adverse environmental conditions either at the time of planting (early season) or at the time of harvesting (late season). Such adverse conditions may be avoided if the harvest cycle is shortened. The growth rate may be determined by deriving various parameters from growth curves, such parameters may be: T-Mid (the time taken for plants to reach 50% of their maximal size) and T-90 (time taken for plants to reach 90% of their maximal size), amongst others.

[0466] According to a preferred feature of the present invention, performance of the methods of the invention gives plants having an increased growth rate relative to control plants. Therefore, according to the present invention, there is provided a method for increasing the growth rate of plants, which method comprises modulating expression, preferably increasing expression, in a plant of a nucleic acid encoding a SYPF1 polypeptide as defined herein.

[0467] An increase in yield and/or growth rate occurs whether the plant is under non-stress conditions or whether the plant is exposed to various stresses compared to control plants. Plants typically respond to exposure to stress by growing more slowly. In conditions of severe stress, the plant may even stop growing altogether. Mild stress on the other hand is defined herein as being any stress to which a plant is exposed which does not result in the plant ceasing to grow altogether without the capacity to resume growth. Mild stress in the sense of the invention leads to a reduction in the growth of the stressed plants of less than 40%, 35% or 30%, preferably less than 25%, 20% or 15%, more preferably less than 14%, 13%, 12%, 11% or 10% or less in comparison to the control plant under non-stress conditions. Due to advances in agricultural practices (irrigation, fertilization, pesticide treatments) severe stresses are not often encountered in cultivated crop plants. As a consequence, the compromised growth induced by mild stress is often an undesirable feature for agriculture. Mild stresses are the everyday biotic and/or abiotic (environmental) stresses to which a plant is exposed. Abiotic stresses may be due to drought or excess water, anaerobic stress, salt stress, chemical toxicity, oxidative stress and hot, cold or freezing temperatures. The abiotic stress may be an osmotic stress caused by a water stress (particularly due to drought), salt stress, oxidative stress or an ionic stress. Biotic stresses are typically those stresses caused by pathogens, such as bacteria, viruses, fungi and insects.

[0468] In particular, the methods of the present invention may be performed under non-stress conditions or under conditions of mild drought to give plants having increased yield relative to control plants. As reported in Wang et al. (Planta (2003) 218: 1-14), abiotic stress leads to a series of morphological, physiological, biochemical and molecular changes that adversely affect plant growth and productivity. Drought, salinity, extreme temperatures and oxidative stress are known to be interconnected and may induce growth and cellular damage through similar mechanisms. Rabbani et al. (Plant Physiol (2003) 133: 1755-1767) describes a particularly high degree of “cross talk” between drought stress and high-salinity stress. For example, drought and/or salinisation are manifested primarily as osmotic stress, resulting in the disruption of homeostasis and ion distribution in the cell. Oxidative stress, which frequently accompanies high or low temperature, salinity or drought stress, may cause denaturing of functional and structural proteins. As a consequence, these diverse environmental stresses often activate similar cell signaling pathways and cellular responses, such as the production of stress proteins, up-regulation of anti-oxidants, accumulation of compatible solutes and growth arrest. The term “non-stress” conditions as used herein are those environmental conditions that allow optimal growth of plants. Persons skilled in the art are aware of normal soil conditions and climatic conditions for a given location.

[0469] Performance of the methods of the invention gives plants grown under non-stress conditions or under mild drought conditions increased yield relative to suitable control plants grown under comparable conditions. Therefore, according to the present invention, there is provided a method for increasing yield in plants grown under non-stress conditions or under mild drought conditions, which method comprises increasing expression in a plant of a nucleic acid encoding a SYPF1 polypeptide.

[0470] The present invention encompasses plants or parts thereof (including seeds) obtainable by the methods according to the present invention. The plants or parts thereof comprise a nucleic acid transgene encoding a SYPF1 polypeptide as defined above.

[0471] The invention also provides genetic constructs and vectors to facilitate introduction and/or expression in plants of nucleic acids encoding SYPF1 polypeptides. The gene constructs may be inserted into vectors, which may be commercially available, suitable for transforming into plants and suitable for expression of the gene of interest in the transformed cells. The invention also provides use of a gene construct as defined herein in the methods of the invention.

[0472] More specifically, the present invention provides a construct comprising:
[0473] (a) a nucleic acid encoding a SYPF1 polypeptide as defined above;
[0474] (b) one or more control sequences capable of driving expression of the nucleic acid sequence of (a); and optionally
[0475] (c) a transcription termination sequence.

[0476] The term “control sequence” and “termination sequence” are as defined herein.

[0477] Plants are transformed with a vector comprising any of the nucleic acids described above. The skilled artisan is well aware of the genetic elements that must be present on the vector in order to successfully transform, select and propagate host cells containing the sequence of interest. The sequence of interest is operably linked to one or more control sequences (at least to a promoter).

[0478] Advantageously, any type of promoter may be used to drive expression of the nucleic acid sequence. A constitutive promoter is particularly useful in the methods of the invention, particularly medium-strength constitutive promoters. It should be clear that the applicability of the present invention is not restricted to the SYPF1 polypeptide-encoding nucleic acid represented by SEQ ID NO: 321, nor is the applicability of the invention restricted to expression of a SYPF1 polypeptide-encoding nucleic acid when driven by a constitutive promoter.

[0479] The constitutive promoter is preferably an HMG (High Mobility Group) promoter. See the “Definitions” section herein for further examples of constitutive promoters.

[0480] For the identification of functionally equivalent promoters, the promoter strength and/or expression pattern of a candidate promoter may be analysed for example by operably linking the promoter to a reporter gene and assaying the expression level and pattern of the reporter gene in various tissues of the plant. Suitable well-known reporter genes include for example beta-glucuronidase or beta galactosidase. The promoter activity is assayed by measuring the enzymatic activity of the beta-glucuronidase or beta-galactosidase. The promoter strength and/or expression pattern may then be compared to that of a reference promoter (such as the one used in the methods of the present invention). Alternatively, promoter strength may be assayed by quantifying mRNA levels or by comparing mRNA levels of the nucleic acid used in the methods of the present invention, with mRNA levels of housekeeping genes such as 18S rRNA, using methods known in the art, such as Northern blotting with densitometric analysis of autoradiograms, quantitative real-time PCR or RT-PCR (Heid et al., 1996 Genome Methods 6: 986-994). Generally by “weak promoter” is intended a promoter that drives expression of a coding sequence at a low level. By “low level” is intended at levels of about 1/10,000 transcripts to about 1/100,000 transcripts, to about 1/500,0000 transcripts per cell. Conversely, a “strong promoter” drives expression of a coding sequence at high level, or at about 1/10 transcripts to about 1/100 transcripts to about 1/1,000 transcripts per cell.

[0481] Optionally, one or more terminator sequences may be used in the construct introduced into a plant. Additional regulatory elements may include transcriptional as well as translational enhancers. Those skilled in the art will be aware of terminator and enhancer sequences that may be suitable for use in performing the invention. Such sequences would be known or may readily be obtained by a person skilled in the art.

[0482] An intron sequence may also be added to the 5′ untranslated region (UTR) or in the coding sequence to increase the amount of the mature message that accumulates in the cytosol. Inclusion of a spliceable intron in the transcription unit in both plant and animal expression constructs has been shown to increase gene expression at both the mRNA and protein levels up to 1000-fold (Buchman and Berg, Mol. Cell Biol. 8:4395-4405 (1988); Callis et al., Genes Dev. 1:1183-1200 (1987)). Such intron enhancement of gene expression is typically greatest when placed near the 5′ end of the transcription unit. Use of the maize introns Adh1-S intron 1, 2, and 6, the Bronze-1 intron are known in the art. For general information, see The Maize Handbook, Chapter 116, Freeling and Walbot, Eds., Springer, N.Y. (1994).

[0483] Other control sequences (besides promoter, enhancer, silencer, intron sequences, 3′UTR and/or 5′UTR regions) may be protein and/or RNA stabilizing elements. Such sequences would be known or may readily be obtained by a person skilled in the art.

[0484] The genetic constructs of the invention may further include an origin of replication sequence that is required for maintenance and/or replication in a specific cell type. One example is when a genetic construct is required to be maintained in a bacterial cell as an episomal genetic element (e.g. plasmid or cosmid molecule). Preferred origins of replication include, but are not limited to, the f1-ori and colE1.

[0485] For the detection of the successful transfer of the nucleic acid sequences as used in the methods of the invention and/or selection of transgenic plants comprising these nucleic acids, it is advantageous to use marker genes (or reporter genes). Therefore, the genetic construct may optionally comprise a selectable marker gene. Selectable markers are described in more detail in the “definitions” section herein.

[0486] It is known that upon stable or transient integration of nucleic acids into plant cells, only a minority of the cells takes up the foreign DNA and, if desired, integrates it into its genome, depending on the expression vector used and the transfection technique used. To identify and select these integrants, a gene coding for a selectable marker (such as the ones described above) is usually introduced into the host cells together with the gene of interest. These markers can for example be used in mutants in which these genes are not functional by, for example, deletion by conventional methods. Furthermore, nucleic acid molecules encoding a selectable marker can be introduced into a host cell on the same vector that comprises the sequence encoding the polypeptides of the invention or used in the methods of the invention, or else in a separate vector. Cells which have been stably transfected with the introduced nucleic acid can be identified for example by selection (for example, cells which have integrated the selectable marker survive whereas the other cells die).

[0487] Since the marker genes, particularly genes for resistance to antibiotics and herbicides, are no longer required or are undesired in the transgenic host cell once the nucleic acids have been introduced successfully, the process according to the invention for introducing the nucleic acids advantageously employs techniques which enable the removal or excision of these marker genes. One such a method is what is known as co-transformation. The co-transformation method employs two vectors simultaneously for the transformation, one vector bearing the nucleic acid according to the invention and a second bearing the marker gene(s). A large proportion of transformants receives or, in the case of plants, comprises (up to 40% or more of the transformants), both vectors. In case of transformation with Agrobacteria, the transformants usually receive only a part of the vector, i.e. the sequence flanked by the T-DNA, which usually represents the expression cassette. The marker genes can subsequently be removed from the transformed plant by performing crosses. In another method, marker genes integrated into a transposon are used for the transformation together with desired nucleic acid (known as the Ac/Ds technology). The transformants can be crossed with a transposase source or the transformants are transformed with a nucleic acid construct conferring expression of a transposase, transiently or stable. In some cases (approx. 10%), the transposon jumps out of the genome of the host cell once transformation has taken place successfully and is lost. In a further number of cases, the transposon jumps to a different location. In these cases the marker gene must be eliminated by performing crosses. In microbiology, techniques were developed which make possible, or facilitate, the detection of such events. A further advantageous method relies on what is known as recombination systems; whose advantage is that elimination by crossing can be dispensed with. The best-known system of this type is what is known as the Cre/lox system. Cre1 is a recombinase that removes the sequences located between the loxP sequences. If the marker gene is integrated between the loxP sequences, it is removed once transformation has taken place successfully, by expression of the recombinase. Further recombination systems are the HIN/HIX, FLP/FRT and REP/STB system (Tribble et al., J. Biol. Chem., 275, 2000: 22255-22267; Velmurugan et al., J. Cell Biol., 149, 2000: 553-566). A site-specific integration into the plant genome of the nucleic acid sequences according to the invention is possible. Naturally, these methods can also be applied to microorganisms such as yeast, fungi or bacteria.

[0488] The invention also provides a method for the production of transgenic plants having enhanced yield-related traits relative to control plants, comprising introduction and expression in a plant of any nucleic acid encoding a SYPF1 polypeptide as defined hereinabove.

[0489] More specifically, the present invention provides a method for the production of transgenic plants having increased yield, which method comprises:
[0490] (i) introducing and expressing in a plant or plant cell a SYPF1 polypeptide-encoding nucleic acid; and
[0491] (ii) cultivating the plant cell under conditions promoting plant growth and development.

[0492] The nucleic acid may be introduced directly into a plant cell or into the plant itself (including introduction into a tissue, organ or any other part of a plant). According to a preferred feature of the present invention, the nucleic acid is preferably introduced into a plant by transformation. The term “transformation” is described in more detail in the “definitions” section herein.

[0493] The genetically modified plant cells can be regenerated via all methods with which the skilled worker is familiar. Suitable methods can be found in the abovementioned publications by S. D. Kung and R. Wu, Potrykus or Höfgen and Willmitzer.

[0494] Generally after transformation, plant cells or cell groupings are selected for the presence of one or more markers which are encoded by plant-expressible genes co-transferred with the gene of interest, following which the transformed material is regenerated into a whole plant. To select transformed plants, the plant material obtained in the transformation is, as a rule, subjected to selective conditions so that transformed plants can be distinguished from untransformed plants. For example, the seeds obtained in the above-described manner can be planted and, after an initial growing period, subjected to a suitable selection by spraying. A further possibility consists in growing the seeds, if appropriate after sterilization, on agar plates using a suitable selection agent so that only the transformed seeds can grow into plants. Alternatively, the transformed plants are screened for the presence of a selectable marker such as the ones described above.

[0495] Following DNA transfer and regeneration, putatively transformed plants may also be evaluated, for instance using Southern analysis, for the presence of the gene of interest, copy number and/or genomic organisation. Alternatively or additionally, expression levels of the newly introduced DNA may be monitored using Northern and/or Western analysis, both techniques being well known to persons having ordinary skill in the art.

[0496] The generated transformed plants may be propagated by a variety of means, such as by clonal propagation or classical breeding techniques. For example, a first generation (or T1) transformed plant may be selfed and homozygous second-generation (or T2) transformants selected, and the T2 plants may then further be propagated through classical breeding techniques.

[0497] The generated transformed organisms may take a variety of forms. For example, they may be chimeras of transformed cells and non-transformed cells; clonal transformants (e.g., all cells transformed to contain the expression cassette); grafts of transformed and untransformed tissues (e.g., in plants, a transformed rootstock grafted to an untransformed scion).

[0498] The present invention clearly extends to any plant cell or plant produced by any of the methods described herein, and to all plant parts and propagules thereof. The present invention extends further to encompass the progeny of a primary transformed or transfected cell, tissue, organ or whole plant that has been produced by any of the aforementioned methods, the only requirement being that progeny exhibit the same genotypic and/or phenotypic characteristic(s) as those produced by the parent in the methods according to the invention.

[0499] The invention also includes host cells containing an isolated nucleic acid encoding a SYPF1 polypeptide as defined hereinabove. Preferred host cells according to the invention are plant cells. Host plants for the nucleic acids or the vector used in the method according to the invention, the expression cassette or construct or vector are, in principle, advantageously all plants, which are capable of synthesizing the polypeptides used in the inventive method.

[0500] The methods of the invention are advantageously applicable to any plant.

[0501] Plants that are particularly useful in the methods of the invention include all plants which belong to the superfamily Viridiplantae, in particular monocotyledonous and dicotyledonous plants including fodder or forage legumes, ornamental plants, food crops, trees or shrubs. According to a preferred embodiment of the present invention, the plant is a crop plant. Examples of crop plants include soybean, sunflower, canola, alfalfa, rapeseed, cotton, tomato, potato and tobacco. Further preferably, the plant is a monocotyledonous plant. Examples of monocotyledonous plants include sugarcane. More preferably the plant is a cereal. Examples of cereals include rice, maize, wheat, barley, millet, rye, sorghum and oats.

[0502] The invention also extends to harvestable parts of a plant such as, but not limited to seeds, leaves, fruits, flowers, stems, rhizomes, tubers and bulbs. The invention furthermore relates to products derived, preferably directly derived, from a harvestable part of such a plant, such as dry pellets or powders, oil, fat and fatty acids, starch or proteins.

[0503] According to a preferred feature of the invention, the modulated expression is increased expression. Methods for increasing expression of nucleic acids or genes, or gene products, are well documented in the art and include, for example, overexpression driven by appropriate promoters, the use of transcription enhancers or translation enhancers. Isolated nucleic acids which serve as promoter or enhancer elements may be introduced in an appropriate position (typically upstream) of a non-heterologous form of a polynucleotide so as to upregulate expression. For example, endogenous promoters may be altered in vivo by mutation, deletion, and/or substitution (see, Kmiec, U.S. Pat. No. 5,565,350; Zarling et al., PCT/US93/03868), or isolated promoters may be introduced into a plant cell in the proper orientation and distance from a gene of the present invention so as to control the expression of the gene.

[0504] If polypeptide expression is desired, it is generally desirable to include a polyadenylation region at the 3′-end of a polynucleotide coding region. The polyadenylation region can be derived from the natural gene, from a variety of other plant genes, or from T-DNA. The 3′ end sequence to be added may be derived from, for example, the nopaline synthase or octopine synthase genes, or alternatively from another plant gene, or less preferably from any other eukaryotic gene.

[0505] As mentioned above, a preferred method for modulating (preferably, increasing) expression of a nucleic acid encoding a SYPF1 polypeptide is by introducing and expressing in a plant a nucleic acid encoding a SYPF1 polypeptide; however the effects of performing the method, i.e. enhancing yield-related traits may also be achieved using other well known techniques. A description of some of these techniques will now follow.

[0506] One such technique is T-DNA activation tagging (Hayashi et al. Science (1992) 1350-1353), which involves insertion of T-DNA, usually containing a promoter (may also be a translation enhancer or an intron), in the genomic region of the gene of interest or 10 kb up- or downstream of the coding region of a gene in a configuration such that the promoter directs expression of the targeted gene. Typically, regulation of expression of the targeted gene by its natural promoter is disrupted and the gene falls under the control of the newly introduced promoter. The promoter is typically embedded in a T-DNA. This T-DNA is randomly inserted into the plant genome, for example, through Agrobacterium infection and leads to modified expression of genes near the inserted T-DNA. The resulting transgenic plants show dominant phenotypes due to modified expression of genes close to the introduced promoter.

[0507] The effects of the invention may also be reproduced using the technique of TILLING (Targeted Induced Local Lesions In Genomes); for a description of the same see the “definitions” section.

[0508] The effects of the invention may also be reproduced using homologous recombination; for a description of the same see the “definitions” section.

[0509] The present invention also encompasses use of nucleic acids encoding SYPF1 polypeptides as described herein and use of these SYPF1 polypeptide in enhancing any of the aforementioned yield-related traits in plants.

[0510] Nucleic acids encoding SYPF1 polypeptide described herein, or the SYPF1 polypeptides themselves, may find use in breeding programmes in which a DNA marker is identified which may be genetically linked to a SYPF1 polypeptide-encoding gene. The nucleic acids/genes, or the SYPF1 polypeptides themselves may be used to define a molecular marker. This DNA or protein marker may then be used in breeding programmes to select plants having enhanced yield-related traits as defined hereinabove in the methods of the invention.

[0511] Allelic variants of a SYPF1 polypeptide-encoding nucleic acid/gene may also find use in marker-assisted breeding programmes. Such breeding programmes sometimes require introduction of allelic variation by mutagenic treatment of the plants, using for example EMS mutagenesis; alternatively, the programme may start with a collection of allelic variants of so called “natural” origin caused unintentionally. Identification of allelic variants then takes place, for example, by PCR. This is followed by a step for selection of superior allelic variants of the sequence in question and which give increased yield. Selection is typically carried out by monitoring growth performance of plants containing different allelic variants of the sequence in question. Growth performance may be monitored in a greenhouse or in the field. Further optional steps include crossing plants in which the superior allelic variant was identified with another plant. This could be used, for example, to make a combination of interesting phenotypic features.

[0512] Nucleic acids encoding SYPF1 polypeptides may also be used as probes for genetically and physically mapping the genes that they are a part of, and as markers for traits linked to those genes. Such information may be useful in plant breeding in order to develop lines with desired phenotypes. Such use of SYPF1 polypeptide-encoding nucleic acids requires only a nucleic acid sequence of at least 15 nucleotides in length. The SYPF1 polypeptide-encoding nucleic acids may be used as restriction fragment length polymorphism (RFLP) markers. Southern blots (Sambrook J, Fritsch E F and Maniatis T (1989) Molecular Cloning, A Laboratory Manual) of restriction-digested plant genomic DNA may be probed with the SYPF1-encoding nucleic acids. The resulting banding patterns may then be subjected to genetic analyses using computer programs such as MapMaker (Lander et al. (1987) Genomics 1: 174-181) in order to construct a genetic map. In addition, the nucleic acids may be used to probe Southern blots containing restriction endonuclease-treated genomic DNAs of a set of individuals representing parent and progeny of a defined genetic cross. Segregation of the DNA polymorphisms is noted and used to calculate the position of the SYPF1 polypeptide-encoding nucleic acid in the genetic map previously obtained using this population (Botstein et al. (1980) Am. J. Hum. Genet. 32:314-331).

[0513] The production and use of plant gene-derived probes for use in genetic mapping is described in Bernatzky and Tanksley (1986) Plant Mol. Biol. Reporter 4: 37-41. Numerous publications describe genetic mapping of specific cDNA clones using the methodology outlined above or variations thereof. For example, F2 intercross populations, backcross populations, randomly mated populations, near isogenic lines, and other sets of individuals may be used for mapping. Such methodologies are well known to those skilled in the art.

[0514] The nucleic acid probes may also be used for physical mapping (i.e., placement of sequences on physical maps; see Hoheisel et al. In: Non-mammalian Genomic Analysis: A Practical Guide, Academic press 1996, pp. 319-346, and references cited therein).

[0515] In another embodiment, the nucleic acid probes may be used in direct fluorescence in situ hybridisation (FISH) mapping (Trask (1991) Trends Genet. 7:149-154). Although current methods of FISH mapping favour use of large clones (several kb to several hundred kb; see Laan et al. (1995) Genome Res. 5:13-20), improvements in sensitivity may allow performance of FISH mapping using shorter probes.

[0516] A variety of nucleic acid amplification-based methods for genetic and physical mapping may be carried out using the nucleic acids. Examples include allele-specific amplification (Kazazian (1989) J. Lab. Clin. Med 11:95-96), polymorphism of PCR-amplified fragments (CAPS; Sheffield et al. (1993) Genomics 16:325-332), allele-specific ligation (Landegren et al. (1988) Science 241:1077-1080), nucleotide extension reactions (Sokolov (1990) Nucleic Acid Res. 18:3671), Radiation Hybrid Mapping (Walter et al. (1997) Nat. Genet. 7:22-28) and Happy Mapping (Dear and Cook (1989) Nucleic Acid Res. 17:6795-6807). For these methods, the sequence of a nucleic acid is used to design and produce primer pairs for use in the amplification reaction or in primer extension reactions. The design of such primers is well known to those skilled in the art. In methods employing PCR-based genetic mapping, it may be necessary to identify DNA sequence differences between the parents of the mapping cross in the region corresponding to the instant nucleic acid sequence. This, however, is generally not necessary for mapping methods.

[0517] The methods according to the present invention result in plants having enhanced yield-related traits, as described hereinbefore. These traits may also be combined with other economically advantageous traits, such as further yield-enhancing traits, tolerance to other abiotic and biotic stresses, traits modifying various architectural features and/or biochemical and/or physiological features.

### (v) RCA

[0518] Surprisingly, it has now been found that increasing expression in a plant of a nucleic acid sequence encoding a Ribulose-1,5-bisphosphate carboxylase/oxygenase (RuBisCO) activase (RCA) polypeptide gives plants having enhanced yield-related traits relative to control plants. The particular class of RCA polypeptides suitable for enhancing yield-related traits in plants is described in detail below.

[0519] The present invention provides a method for enhancing yield-related traits in plants relative to control plants, comprising increasing expression in a plant of a nucleic acid sequence encoding an RCA polypeptide.

[0520] Any reference hereinafter to a “polypeptide useful in the methods of the invention” is taken to mean an RCA polypeptide as defined herein. Any reference hereinafter to a “nucleic acid sequence useful in the methods of the invention” is taken to mean a nucleic acid sequence capable of encoding such an RCA polypeptide. The terms “polypeptide” and “protein” are as defined herein. The terms “polynucleotide(s)”, “nucleic acid sequence(s)”, “nucleotide sequence(s)” are also defined herein. The term “control plant” is also as defined herein.

[0521] A preferred method for increasing expression of a nucleic acid sequence encoding a polypeptide useful in the methods of the invention is by introducing and expressing in a plant a nucleic acid sequence encoding a polypeptide useful in the methods of the invention as defined below.

[0522] The nucleic acid sequence to be introduced into a plant (and therefore useful in performing the methods of the invention) is any nucleic acid sequence encoding the type of polypeptide which will now be described, hereafter also named “RCA nucleic acid sequence” or “RCA gene”. An “RCA” polypeptide as defined herein refers to any polypeptide sequence that is not redox-regulated and comprising from N-terminus to C-terminus: (i) a plastidic transit peptide; (ii) in increasing order of preference at least 60%, 65%, 70%, 75%, 80%, 85%, 90%, 95% or 98% sequence identity to the AAA domain as represented by SEQ ID NO: 311.

[0523] Additionally, an RCA polypeptide may comprise within the AAA domain a Motif 1 G(G/R)KG(Q/E)GK(S/T) as represented by SEQ ID NO: 312. Within this motif, is allowed one or more conservative change at any position, and/or one or two non-conservative change(s) at any position.

[0524] Alternatively, an “RCA” polypeptide as defined herein refers to any polypeptide sequence that is not redox-regulated with in increasing order of preference at least 50%, 55%, 60%, 65%, 70%, 75%, 80%, 85%, 90%, 95% or 98% sequence identity to the RCA polypeptide as represented by SEQ ID NO: 251.

[0525] An RCA polypeptide that is not redox-regulated is herein taken to mean an RCA polypeptide that is not regulated by light via the ferredoxin/thioredoxin system. Examples of such RCA polypeptides are the naturally occurring beta (short form, or SF) RCA polypeptides, or alpha (long form, or LF)) RCA polypeptides that have been truncated or mutated in the C-terminal extension to prevent redox regulation.

[0526] Examples of polypeptides useful in the methods of the invention and nucleic acid sequences encoding the same are as given below in table D1 of the Examples section. Such RCA polypeptides are the naturally occurring beta (short form, or SF) RCA polypeptides, or alpha (long form, or LF)) RCA polypeptides that are truncated or mutated in the C-terminal extension to prevent redox regulation.

[0527] Also useful in the methods of the invention are homologues of any one of the polypeptide sequences given in table D1 in the Examples section. “Homologues” are defined in the Definitions section herein.

[0528] Also useful in the methods of the invention are derivatives of any one of the polypeptides given in table D1 or orthologues or paralogues of any of the aforementioned SEQ ID NOs. “Derivatives” are as defined in the Definitions section herein. Derivatives of SEQ ID NO: 251 or of any of the polypeptides given in table D1 are preferred.

[0529] The invention is illustrated by transforming plants with the Chlamydomonas reinhardtii nucleic acid sequence represented by SEQ ID NO: 250, encoding the polypeptide sequence of SEQ ID NO: 251, however performance of the invention is not restricted to these sequences. The methods of the invention may advantageously be performed using any nucleic acid sequence encoding a polypeptide useful in the methods of the invention as defined herein, including orthologues and paralogues, such as any of the nucleic acid sequences given in table D1. Such RCA polypeptides are the naturally occurring beta (short form, or SF) RCA polypeptides, or alpha (long form, or LF)) RCA polypeptides that are truncated or mutated in the C-terminal extension to prevent redox regulation.

[0530] The polypeptide sequences given in table D1 may be considered to be orthologues and paralogues of the RCA polypeptide represented by SEQ ID NO: 251, the terms “orthologues” and “paralogues” being as defined herein.

[0531] Orthologues and paralogues may easily be found by performing a so-called reciprocal blast search. Typically, this involves a first BLAST involving BLASTing a query sequence (for example using any of the sequences listed in table D1) against any sequence database, such as the publicly available NCBI database. BLASTN or TBLASTX (using standard default values) are generally used when starting from a nucleotide sequence, and BLASTP or TBLASTN (using standard default values) when starting from a polypeptide sequence. The BLAST results may optionally be filtered. The full-length sequences of either the filtered results or non-filtered results are then BLASTed back (second BLAST) against sequences from the organism from which the query sequence is derived (where the query sequence is SEQ ID NO: 250 or SEQ ID NO: 251, the second BLAST would therefore be against Chlamydomonas reinhardtii sequences). The results of the first and second BLASTs are then compared. A paralogue is identified if a high-ranking hit from the first blast is from the same species as from which the query sequence is derived, a BLAST back then ideally results in the query sequence as highest hit; an orthologue is identified if a high-ranking hit in the first BLAST is not from the same species as from which the query sequence is derived, and preferably results upon BLAST back in the query sequence being among the highest hits.

[0532] High-ranking hits are those having a low E-value. The lower the E-value, the more significant the score (or in other words the lower the chance that the hit was found by chance). Computation of the E-value is well known in the art. In addition to E-values, comparisons are also scored by percentage identity. Percentage identity refers to the number of identical nucleotides (or amino acids) between the two compared nucleic acid (or polypeptide) sequences over a particular length. In the case of large families, ClustalW may be used, followed by a neighbour joining tree, to help visualize clustering of related genes and to identify orthologues and paralogues.

[0533] Table D1 gives examples of orthologues and paralogues of the RCA polypeptide represented by SEQ ID NO 251. Further orthologues and paralogues may readily be identified using the BLAST procedure described above. Such RCA polypeptides are the naturally occurring beta (short form, or SF) RCA polypeptides, or alpha (long form, or LF)) RCA polypeptides that are truncated or mutated in the C-terminal extension to prevent redox regulation.

[0534] The polypeptides of the invention are identifiable by the presence of the conserved AAA domain (shown in FIG. 14), the term “domain” being as defined herein. The term “motif”, “consensus sequence” and “signature” are also defined herein.

[0535] The term “extension” as defined herein, refers to the additional amino acid residues of polypeptides extending beyond the last amino acid of the shortest polypeptide in a multiple sequence alignment. The amino acid residues may be naturally occurring, or modified by human intervention.

[0536] Specialist databases also exist for the identification of domains, for example, SMART (Schultz et al. (1998) Proc. Natl. Acad. Sci. USA 95, 5857-5864; Letunic et al. (2002) Nucleic Acids Res 30, 242-244, InterPro (Mulder et al., (2003) Nucl. Acids. Res. 31, 315-318, Prosite (Bucher and Bairoch (1994), A generalized profile syntax for biomolecular sequences motifs and its function in automatic sequence interpretation. (In) ISMB-94; Proceedings 2nd International Conference on Intelligent Systems for Molecular Biology. Altman R., Brutlag D., Karp P., Lathrop R., Searls D., Eds., pp 53-61, AAAIPress, Menlo Park; Hulo et al., Nucl. Acids. Res. 32:D134-D137, (2004), or Pfam (Bateman et al., Nucleic Acids Research 30(1): 276-280 (2002). A set of tools for in silico analysis of polypeptide sequences is available on the ExPASY proteomics server (hosted by the Swiss Institute of Bioinformatics (Gasteiger et al., ExPASy: the proteomics server for in-depth protein knowledge and analysis, Nucleic Acids Res. 31:3784-3788 (2003)). For example, the AAA domain of SEQ ID NO: 251 is represented in the InterPro database by accession number IPRO03959.

[0537] Domains may also be identified using routine techniques, such as by sequence alignment. Methods for the alignment of sequences for comparison are well known in the art, such methods include GAP, BESTFIT, BLAST, FASTA and TFASTA. GAP uses the algorithm of Needleman and Wunsch ((1970) J Mol Biol 48: 443-453) to find the global (i.e. spanning the complete sequences) alignment of two sequences that maximizes the number of matches and minimizes the number of gaps. The BLAST algorithm (Altschul et al. (1990) J Mol Biol 215: 403-10) calculates percent sequence identity and performs a statistical analysis of the similarity between the two sequences. The software for performing BLAST analysis is publicly available through the National Centre for Biotechnology Information (NCBI). Homologues may readily be identified using, for example, the ClustalW multiple sequence alignment algorithm (version 1.83), with the default pairwise alignment parameters, and a scoring method in percentage. Global percentages of similarity and identity may also be determined using one of the methods available in the MatGAT software package (Campanella et al., BMC Bioinformatics. 2003 Jul. 10; 4:29. MatGAT: an application that generates similarity/identity matrices using protein or DNA sequences.). Minor manual editing may be performed to optimise alignment between conserved motifs, as would be apparent to a person skilled in the art. Furthermore, instead of using full-length sequences for the identification of homologues, specific domains (such as the AAA domain, or Motif1 defined above) may be used as well. The sequence identity values, which are indicated below in Example 3 as a percentage were determined over the entire nucleic acid or polypeptide sequence, and/or over selected domains or conserved motif(s), using the programs mentioned above using the default parameters.

[0538] The task of protein subcellular localisation prediction is important and well studied. Knowing a protein's localisation helps elucidate its function. Experimental methods for protein localization range from immunolocalization to tagging of proteins using green fluorescent protein (GFP). Such methods are accurate although labor-intensive compared with computational methods. Recently much progress has been made in computational prediction of protein localisation from sequence data. Among algorithms well known to a person skilled in the art are available at the ExPASy Proteomics tools hosted by the Swiss Institute for Bioinformatics, for example, PSort, TargetP, ChloroP, Predotar, LipoP, MITOPROT, PATS, PTS1, SignalP and others. The identification of subcellular localisation of the polypeptide of the invention is described in the Examples section herein. In particular SEQ ID NO: 251 of the present invention is assigned to the plastidic (chloroplastic) compartment of photosynthetic (autotrophic) cells.

[0539] Methods for targeting to plastids are well known in the art and include the use of transit peptides. The table below shows examples of transit peptides which can be used to target any RCA polypeptide to a plastid, which RCA polypeptide is not, in its natural form, normally targeted to a plastid, or which RCA polypeptide in its natural form is targeted to a plastid by virtue of a different transit peptide (for example, its natural transit peptide). For example, a nucleic acid sequence encoding a cyanobacterial RCA polypeptide (from Anabaena, described by Li et al., (1993) Plant Molec Biol 21(5): 753-764; SEQ ID NO: 301) may also be suitable for use in the methods of the invention so long as the RCA polypeptide is targeted to a plastid, preferably to a chloroplast, and that it is not redox-regulated.

[0540] Examples of transit peptide sequences useful in targeting polypeptides to plastids

| NCBI Accession | | | |
|---|---|---|---|
| Number/SEQ ID | | | |
| NO | Source Organism | Protein Function | Transit Peptide Sequence |
| SEQ ID NO: | Chlamydomonas | Ferredoxin | MAMAMRSTFAARVGAKPAVRGARPASRMSCMA |
| P07839 | | | |
| SEQ ID NO: | Chlamydomonas | Rubisco activase | MQVTMKSSAVSGQRVGGARVATRSVRRAQLQV |
| AAR23425 | | | |
| SEQ ID NO: | Arabidopsis | Aspartate amino transferase | MASLMLSLGSTSLLPREINKDKLKLGTSASNPFLK |
| CAA56932 | thaliana | | AKSFSRVTMTVAVKPSR |
| SEQ ID NO: | Arabidopsis | Acyl carrier protein1 | MATQFSASVSLQTSCLATTRISFQKPALISNHGKT |
| CAA31991 | thaliana | | NLSFNLRRSIPSRRLSVSC |
| SEQ ID NO: | Arabidopsis | Acyl carrier protein2 | MASIAASASISLQARPRQLAIAASQVKSFSNGRRS |
| CAB63798 | thaliana | | SLSFNLRQLPTRLTVSCAAKPETVDKVCAVVRKQ$$ |
| SEQ ID NO: | Arabidopsis | Acyl carrier protein3 | MASIATSASTSLQARPRQLVIGAKQVKSFSYGSRS |
| CAB63799 | thaliana | | NLSFNLRQLPTRLTVYCAAKPETVDKVCAVVRKQ |
| | | | LSLKE |

[0541] The RCA polypeptide is targeted and active in the chloroplast, i.e., the RCA polypeptide is capable of performing a dual activity: (re)-activation of RuBisCo, and ATP hydrolysis, in the chloroplast. Assays for testing these activities are well known in the art. Further details are provided in the Examples section herein.

[0542] Nucleic acid sequences encoding polypeptides useful in the methods of the invention need not be full-length nucleic acid sequences, since performance of the methods of the invention does not rely on the use of full-length nucleic acid sequences. Examples of nucleic acid sequences suitable for use in performing the methods of the invention include the nucleic acid sequences given in table D1, but are not limited to those sequences. Nucleic acid variants may also be useful in practising the methods of the invention. Examples of such nucleic acid variants include portions of nucleic acid sequences encoding a polypeptide useful in the methods of the invention, nucleic acid sequences hybridising to nucleic acid sequences encoding a polypeptide useful in the methods of the invention, splice variants of nucleic acid sequences encoding a polypeptide useful in the methods of the invention, allelic variants of nucleic acid sequences encoding a polypeptide useful in the methods of the invention and variants of nucleic acid sequences encoding a polypeptide useful in the methods of the invention that are obtained by site-directed mutagenesis. The terms portion, hybridising sequence, splice variant, allelic variant and site-directed mutagenesis will now be described.

[0543] According to the present invention, there is provided a method for enhancing yield-related traits in plants, comprising introducing and expressing in a plant a portion of any one of the nucleic acid sequences given in table D1, or a portion of a nucleic acid sequence encoding an orthologue, paralogue or homologue of any of the polypeptide sequences given in table D1. Such portions of RCA polypeptides are from naturally occurring beta (short form, or SF) RCA polypeptides, or from alpha (long form, or LF)) RCA polypeptides that are truncated or mutated in the C-terminal extension to prevent redox regulation.

[0544] Portions useful in the methods of the invention, encode a polypeptide falling within the definition of a nucleic acid sequence encoding a polypeptide useful in the methods of the invention as defined herein and having substantially the same biological activity as the polypeptide sequences given in table D1. Preferably, the portion is a portion of any one of the nucleic acid sequences given in table D1. The portion is typically at least 900 consecutive nucleotides in length, preferably at least 1000 consecutive nucleotides in length, more preferably at least 1100 consecutive nucleotides in length and most preferably at least 1227 consecutive nucleotides in length, the consecutive nucleotides being of any one of the nucleic acid sequences given in table D1. Preferably, the portion encodes a polypeptide sequence that is not redox-regulated and comprising from N-terminus to C-terminus: (i) a plastidic transit peptide; (ii) in increasing order of preference at least 60%, 65%, 70%, 75%, 80%, 85%, 90%, 95% or 98% sequence identity to the AAA domain as represented by SEQ ID NO: 311; and which may additionally comprise within the AAA domain a Motif 1 G(G/R)KG(Q/E)GK(S/T) as represented by SEQ ID NO: 312. Most preferably the portion is a portion of the nucleic acid sequence of SEQ ID NO: 250.

[0545] A portion of a nucleic acid sequence encoding an RCA polypeptide as defined herein may be prepared, for example, by making one or more deletions to the nucleic acid sequence. The portions may be used in isolated form or they may be fused to other coding (or non coding) sequences in order to, for example, produce a polypeptide that combines several activities, or to produce a polypeptide targeted to another subcellular compartment than its natural compartment. When fused to other coding sequences, the resultant polypeptide produced upon translation may be bigger than that predicted for the RCA polypeptide portion.

[0546] Another nucleic acid variant useful in the methods of the invention is a nucleic acid sequence capable of hybridising, under reduced stringency conditions, preferably under stringent conditions, with a nucleic acid sequence encoding an RCA polypeptide as defined herein, or with a portion as defined herein.

[0547] Hybridising sequences useful in the methods of the invention encode a polypeptide sequence comprising from N-terminus to C-terminus: (i) a plastidic transit peptide; (ii) in increasing order of preference at least 60%, 65%, 70%, 75%, 80%, 85%, 90%, 95% or 98% sequence identity to the AAA domain as represented by SEQ ID NO: 311; and which may additionally comprise within the AAA domain a Motif 1 G(G/R)KG(Q/E)GK(S/T) as represented by SEQ ID NO: 312. The hybridising sequence is typically at least 900 consecutive nucleotides in length, preferably at least 1000 consecutive nucleotides in length, more preferably at least 1100 consecutive nucleotides in length and most preferably at least 1200 consecutive nucleotides in length, the consecutive nucleotides being of any one of the nucleic acid sequences given in table D1. Preferably, the hybridising sequence is one that is capable of hybridising to any of the nucleic acid sequences given in table D1, or to a portion of any of these sequences, a portion being as defined above. Most preferably, the hybridising sequence is capable of hybridising to a nucleic acid sequence as represented by SEQ ID NO: 250 or to a portion thereof.

[0548] According to the present invention, there is provided a method for enhancing yield-related traits in plants, comprising introducing and expressing in a plant a nucleic acid sequence capable of hybridizing to any one of the nucleic acid sequences given in table D1, or comprising introducing and expressing in a plant a nucleic acid sequence capable of hybridising to a nucleic acid sequence encoding an orthologue, paralogue or homologue of any of the nucleic acid sequences given in the table D1. Such hybridising sequences encode naturally occurring beta (short form, or SF) RCA polypeptides, or encode alpha (long form, or LF)) RCA polypeptides that are truncated or mutated in the C-terminal extension to prevent redox regulation. The term “hybridisation” is as defined herein.

[0549] Another nucleic acid variant useful in the methods of the invention is a splice variant encoding an RCA polypeptide as defined hereinabove, the term “splice variant” being as defined herein.

[0550] According to the present invention, there is provided a method for enhancing yield-related traits in plants, comprising introducing and expressing in a plant a splice variant of any one of the nucleic acid sequences given in table D1, or a splice variant of a nucleic acid sequence encoding an orthologue, paralogue or homologue of any of the polypeptide sequences given in table D1. Such splice variants of nucleic acid sequences encode naturally occurring beta (short form, or SF) RCA polypeptides, or from alpha (long form, or LF)) RCA polypeptides that are truncated or mutated in the C-terminal extension to prevent redox regulation.

[0551] Preferred splice variants are splice variants of a nucleic acid sequence represented by SEQ ID NO: 250 or a splice variant of a nucleic acid sequence encoding an orthologue or paralogue of SEQ ID NO: 251. Preferably, the polypeptide sequence encoded by the splice variant comprises any one or more of the motifs or domains as defined herein.

[0552] Another nucleic acid variant useful in performing the methods of the invention is an allelic variant of a nucleic acid sequence encoding an RCA polypeptide as defined hereinabove. Alleles or allelic variants are alternative forms of a given gene, located at the same chromosomal position. Allelic variants exist in nature, and encompassed within the methods of the present invention is the use of these natural alleles. Allelic variants encompass Single Nucleotide Polymorphisms (SNPs), as well as Small Insertion/Deletion Polymorphisms (INDELs). The size of INDELs is usually less than 100 bp. SNPs and INDELs form the largest set of sequence variants in naturally occurring polymorphic strains of most organisms.

[0553] According to the present invention, there is provided a method for enhancing yield-related traits in plants, comprising introducing and expressing in a plant an allelic variant of any one of the nucleic acid sequences given in table D1, or comprising introducing and expressing in a plant an allelic variant of a nucleic acid sequence encoding an orthologue, paralogue or homologue of any of the polypeptide sequences given in table D1. Such allelic variants of nucleic acid sequences encode naturally occurring beta (short form, or SF) RCA polypeptides, or encode alpha (long form, or LF)) RCA polypeptides that are truncated or mutated in the C-terminal extension to prevent redox regulation.

[0554] Preferably, the allelic variant is an allelic variant of SEQ ID NO: 250 or an allelic variant of a nucleic acid sequence encoding an orthologue or paralogue of SEQ ID NO: 251. Preferably, the polypeptide sequence encoded by the allelic variant comprises any one or more of the motifs or domains as defined herein.

[0555] A further nucleic acid variant useful in the methods of the invention is a nucleic acid variant obtained by site-directed mutagenesis, which is defined in the Definitions section herein.

[0556] According to the present invention, there is provided a method for enhancing yield-related traits in plants, comprising introducing and expressing in a plant a variant of any one of the nucleic acid sequences given in table D1, or comprising introducing and expressing in a plant a variant of a nucleic acid sequence encoding an orthologue, paralogue or homologue of any of the polypeptide sequences given in table D1, which variant nucleic acid sequence is obtained by site-directed mutagenesis. Such nucleic acid variants obtained by site directed mutagenesis encode beta (short form, or SF) RCA polypeptides, or encode alpha (long form, or LF)) RCA polypeptides that are truncated or mutated in the C-terminal extension to prevent redox regulation.

[0557] Preferably, the variant nucleic acid sequence obtained by site-directed mutagenesis encodes a polypeptide sequence comprising any one or more of the motifs or domains as defined herein.

[0558] The following nucleic acid variants encoding RCA polypeptides are examples of variants suitable in practising the methods of the invention:
[0559] (i) a portion of a nucleic acid sequence encoding an RCA polypeptide;
[0560] (ii) a nucleic acid sequence capable of hybridising with a nucleic acid sequence encoding an RCA polypeptide;
[0561] (iii) a splice variant of a nucleic acid sequence encoding an RCA polypeptide;
[0562] (iv) an allelic variant of a nucleic acid sequence encoding an RCA polypeptide;
[0563] (v) a nucleic acid sequence encoding an RCA polypeptide obtained by site-directed mutagenesis;
   which RCA polypeptide is not redox-regulated.

[0564] Nucleic acid sequences encoding RCA polypeptides may be derived from any natural or artificial source. The nucleic acid sequence may be modified from its native form in composition and/or genomic environment through deliberate human manipulation. Preferably the nucleic acid sequence encoding an RCA polypeptide originates from a photosynthetic cell (Plantae kingdom). Further preferably the nucleic acid sequence encoding an RCA polypeptide originates from a plant cell. More preferably, the nucleic acid sequence encoding an RCA polypeptide originates from a diatom cell. Most preferably the nucleic acid sequence encoding an RCA polypeptide originates from an algal (red, brown or green) cell. The nucleic acid sequence may be isolated from green algae belonging Chlorophyta or Charophyta, or from land plants, non-vascular or vascular. Most preferably the nucleic acid sequence encoding an RCA polypeptide is from Chlamydomonas reinhardtii.

[0565] Any reference herein to an RCA polypeptide is therefore taken to mean an RCA polypeptide as defined above. Any nucleic acid sequence encoding such an RCA polypeptide is suitable for use in performing the methods of the invention.

[0566] The present invention also encompasses plants or parts thereof (including seeds) obtainable by the methods according to the present invention. The plants or parts thereof comprise a nucleic acid transgene encoding an RCA polypeptide as defined above.

[0567] The invention also provides genetic constructs and vectors to facilitate introduction and/or expression of the nucleic acid sequences useful in the methods according to the invention, in a plant. The gene constructs may be inserted into vectors, which may be commercially available, suitable for transforming into plants and suitable for expression of the gene of interest in the transformed cells. The invention also provides use of a gene construct as defined herein in the methods of the invention.

[0568] More specifically, the present invention provides a construct comprising
[0569] (a) nucleic acid sequence encoding an RCA polypeptide, as defined above;
[0570] (b) one or more control sequences capable of driving expression of the nucleic acid sequence of (a); and optionally
[0571] (c) a transcription termination sequence.

[0572] A preferred construct is one in which the control sequence is a strong constitutive promoter, more preferably a GOS2 promoter, further preferably the rice GOS2 promoter, most preferably the rice GOS2 promoter as represented by SEQ ID NO: 306.

[0573] Alternatively, a preferred construct is one in which the control sequence is a constitutive promoter of medium strength, more preferably an HMGB promoter, further preferably the rice HMGB promoter as represented by SEQ ID NO: 307.

[0574] Alternatively, a preferred construct is one in which the control sequence is a green tissue-specific promoter, more preferably a protochlorophyllide reductase promoter, further preferably the rice protochlorophyllide reductase promoter as represented by SEQ ID NO: 308.

[0575] Plants are transformed with a vector comprising the sequence of interest (i.e., a nucleic acid sequence encoding an RCA polypeptide as defined herein. The skilled artisan is well aware of the genetic elements that must be present on the vector in order to successfully transform, select and propagate host cells containing the sequence of interest. The sequence of interest is operably linked to one or more control sequences (at least to a promoter). The terms “regulatory element”, “control sequence” and “promoter” are as defined herein. The term “operably linked” is also as defined herein.

[0576] Advantageously, any type of promoter may be used to drive expression of the nucleic acid sequence. The term “promoter” refers to a nucleic acid control sequence located upstream from the transcriptional start of a gene and which is involved in recognising and binding of RNA polymerase and other proteins, thereby directing transcription of an operably linked nucleic acid sequence. A “plant” promoter comprises regulatory elements, which mediate the expression of a coding sequence segment in plant cells. Accordingly, a plant promoter need not be of plant origin, but may originate from viruses or micro-organisms, for example from viruses which attack plant cells. The “plant promoter” can also originate from a plant cell, e.g. from the plant which is transformed with the nucleic acid sequence to be expressed in the inventive process and described herein. This also applies to other “plant” regulatory signals, such as “plant” terminators. The promoters upstream of the nucleotide sequences useful in the methods of the present invention can be modified by one or more nucleotide substitution(s), insertion(s) and/or deletion(s) without interfering with the functionality or activity of either the promoters, the open reading frame (ORF) or the 3′-regulatory region such as terminators or other 3′ regulatory regions which are located away from the ORF. It is furthermore possible that the activity of the promoters is increased by modification of their sequence, or that they are replaced completely by more active promoters, even promoters from heterologous organisms. For expression in plants, the nucleic acid molecule must, as described above, be linked operably to or comprise a suitable promoter which expresses the gene at the right point in time and with the required spatial expression pattern.

[0577] The promoter may be a constitutive promoter or an inducible promoter, for example a stress-inducible promoter. Alternatively, the promoter may be an organ-specific or tissue-specific promoter (see Definitions section herein for Definitions and examples of various promoter types).

[0578] In one embodiment, the nucleic acid sequence is operably linked to a strong constitutive promoter. Preferably the promoter is derived from a plant, more preferably the promoter is from a monocotyledonous plant if a monocotyledonous plant is to be transformed.

[0579] In a preferred embodiment, the constitutive promoter is a GOS2 promoter, further preferably a rice GOS2 promoter. Most preferably, the GOS2 promoter is as represented by SEQ ID NO: 306. It should be clear that the applicability of the present invention is not restricted to the nucleic acid sequence encoding an RCA polypeptide as represented by SEQ ID NO: 250, nor is the applicability of the invention restricted to expression of a nucleic acid sequence encoding an RCA polypeptide when driven by a GOS2 promoter.

[0580] Alternatively, the nucleic acid sequence is operably linked to a constitutive promoter, preferably an HMGB promoter, further preferably a rice HMGB promoter. Most preferably, the HMGB promoter is as represented by SEQ ID NO: 307. It should be clear that the applicability of the present invention is not restricted to the nucleic acid sequence encoding an RCA polypeptide as represented by SEQ ID NO: 250, nor is the applicability of the invention restricted to expression of a nucleic acid sequence encoding an RCA polypeptide when driven by an HMGB promoter.

[0581] According to another preferred embodiment, the nucleic acid encoding an RCA polypeptide is operably linked to a green tissue-specific promoter, preferably a protochlorophyllide reductase promoter, further preferably a rice protochlorophyllide reductase promoter. Most preferably, the green tissue-specific promoter is as represented by SEQ ID NO: 308. It should be clear that the applicability of the present invention is not restricted to the nucleic acid sequence encoding an RCA polypeptide as represented by SEQ ID NO: 250, nor is the applicability of the invention restricted to expression of a nucleic acid sequence encoding an RCA polypeptide when driven by a protochlorophyllide reductase promoter. Other green-tissue specific promoters which are available for the expression of genes in plants are described in DE-A 19644478.

[0582] For the identification of functionally equivalent promoters, the promoter strength and/or expression pattern of a candidate promoter may be analysed for example by operably linking the promoter to a reporter gene and assay the expression level and pattern of the reporter gene in various tissues of the plant. Suitable well-known reporter genes include for example beta-glucuronidase or beta galactosidase. The promoter activity is assayed by measuring the enzymatic activity of the beta-glucuronidase or beta-galactosidase. The promoter strength and/or expression pattern may then be compared to that of a reference promoter (such as the one used in the methods of the present invention). Alternatively, promoter strength may be assayed by quantifying mRNA levels or by comparing mRNA levels of the nucleic acid sequence used in the methods of the present invention, with mRNA levels of housekeeping genes such as 18S rRNA, using methods known in the art, such as Northern blotting with densitometric analysis of autoradiograms, quantitative real-time PCR or RT-PCR (Heid et al., 1996 Genome Methods 6: 986-994). Generally by “weak promoter” is intended a promoter that drives expression of a coding sequence at a low level. By “low level” is intended at levels of about 1/10,000 transcripts to about 1/100,000 transcripts, to about 1/500,0000 transcripts per cell. Conversely, a “strong promoter” drives expression of a coding sequence at high level, or at about 1/10 transcripts to about 1/100 transcripts to about 1/1,000 transcripts per cell.

[0583] Optionally, one or more terminator sequences may be used in the construct introduced into a plant; the term “terminator” being as defined herein. Additional regulatory elements may include transcriptional as well as translational enhancers. Those skilled in the art will be aware of terminator and enhancer sequences that may be suitable for use in performing the invention. Such sequences would be known or may readily be obtained by a person skilled in the art.

[0584] An intron sequence may also be added to the 5′ untranslated region (UTR) or in the coding sequence to increase the amount of the mature message that accumulates in the cytosol. Inclusion of a spliceable intron in the transcription unit in both plant and animal expression constructs has been shown to increase gene expression at both the mRNA and protein levels up to 1000-fold (Buchman and Berg, Mol. Cell Biol. 8:4395-4405 (1988); Callis et al., Genes Dev. 1:1183-1200 (1987)). Such intron enhancement of gene expression is typically greatest when placed near the 5′ end of the transcription unit. Use of the maize introns Adh1-S intron 1, 2, and 6, the Bronze-1 intron are known in the art. For general information, see The Maize Handbook, Chapter 116, Freeling and Walbot, Eds., Springer, N.Y. (1994).

[0585] Other control sequences (besides promoter, enhancer, silencer, intron sequences, 3′UTR and/or 5′UTR regions) may be protein and/or RNA stabilizing elements. Such sequences would be known or may readily be obtained by a person skilled in the art.

[0586] The genetic constructs of the invention may further include an origin of replication sequence that is required for maintenance and/or replication in a specific cell type. One example is when a genetic construct is required to be maintained in a bacterial cell as an episomal genetic element (e.g. plasmid or cosmid molecule). Preferred origins of replication include, but are not limited to, the f1-ori and colE1.

[0587] For the detection of the successful transfer of the nucleic acid sequences as used in the methods of the invention and/or selection of transgenic plants comprising these nucleic acid sequences, it is advantageous to use marker genes (or reporter genes). Therefore, the genetic construct may optionally comprise a selectable marker gene. As used herein, the term “selectable marker”, “selectable marker gene” or “reporter gene” includes any gene that confers a phenotype on a cell in which it is expressed to facilitate the identification and/or selection of cells that are transfected or transformed with a nucleic acid construct of the invention. These marker genes enable the identification of a successful transfer of the nucleic acid molecules via a series of different principles. Suitable markers may be selected from markers that confer antibiotic or herbicide resistance, that introduce a new metabolic trait or that allow visual selection. Examples of selectable marker genes include genes conferring resistance to antibiotics (such as nptII that phosphorylates neomycin and kanamycin, or hpt, phosphorylating hygromycin, or genes conferring resistance to, for example, bleomycin, streptomycin, tetracyclin, chloramphenicol, ampicillin, gentamycin, geneticin (G418), spectinomycin or blasticidin), to herbicides (for example bar which provides resistance to Basta®; aroA or gox providing resistance against glyphosate, or the genes conferring resistance to, for example, imidazolinone, phosphinothricin or sulfonylurea), or genes that provide a metabolic trait (such as manA that allows plants to use mannose as sole carbon source or xylose isomerase for the utilisation of xylose, or antinutritive markers such as the resistance to 2-deoxyglucose). Expression of visual marker genes results in the formation of colour (for example β-glucuronidase, GUS or β-galactosidase with its coloured substrates, for example X-Gal), luminescence (such as the luciferin/luciferase system) or fluorescence (Green Fluorescent Protein, GFP, and derivatives thereof). This list represents only a small number of possible markers. The skilled worker is familiar with such markers. Different markers are preferred, depending on the organism and the selection method.

[0588] It is known that upon stable or transient integration of nucleic acid sequences into plant cells, only a minority of the cells takes up the foreign DNA and, if desired, integrates it into its genome, depending on the expression vector used and the transfection technique used. To identify and select these integrants, a gene coding for a selectable marker (such as the ones described above) is usually introduced into the host cells together with the gene of interest. These markers can for example be used in mutants in which these genes are not functional by, for example, deletion by conventional methods. Furthermore, nucleic acid molecules encoding a selectable marker can be introduced into a host cell on the same vector that comprises the sequence encoding the polypeptides of the invention or used in the methods of the invention, or else in a separate vector. Cells which have been stably transfected with the introduced nucleic acid sequence can be identified for example by selection (for example, cells which have integrated the selectable marker survive whereas the other cells die).

[0589] Since the marker genes, particularly genes for resistance to antibiotics and herbicides, are no longer required or are undesired in the transgenic host cell once the nucleic acid sequence have been introduced successfully, the process according to the invention for introducing the nucleic acid sequences advantageously employs techniques which enable the removal or excision of these marker genes. One such a method is what is known as co-transformation. The co-transformation method employs two vectors simultaneously for the transformation, one vector bearing the nucleic acid sequence according to the invention and a second bearing the marker gene(s). A large proportion of transformants receives or, in the case of plants, comprises (up to 40% or more of the transformants), both vectors. In case of transformation with Agrobacteria, the transformants usually receive only a part of the vector, i.e. the sequence flanked by the T-DNA, which usually represents the expression cassette. The marker genes can subsequently be removed from the transformed plant by performing crosses. In another method, marker genes integrated into a transposon are used for the transformation together with desired nucleic acid sequence (known as the Ac/Ds technology). The transformants can be crossed with a transposase source or the transformants are transformed with a nucleic acid construct conferring expression of a transposase, transiently or stable. In some cases (approx. 10%), the transposon jumps out of the genome of the host cell once transformation has taken place successfully and is lost. In a further number of cases, the transposon jumps to a different location. In these cases the marker gene must be eliminated by performing crosses. In microbiology, techniques were developed which make possible, or facilitate, the detection of such events. A further advantageous method relies on what is known as recombination systems; whose advantage is that elimination by crossing can be dispensed with. The best-known system of this type is what is known as the Cre/lox system. Cre1 is a recombinase that removes the sequences located between the loxP sequences. If the marker gene is integrated between the loxP sequences, it is removed once transformation has taken place successfully, by expression of the recombinase. Further recombination systems are the HIN/HIX, FLP/FRT and REP/STB system (Tribble et al., J. Biol. Chem., 275, 2000: 22255-22267; Velmurugan et al., J. Cell Biol., 149, 2000: 553-566). A site-specific integration into the plant genome of the nucleic acid sequences according to the invention is possible. Naturally, these methods can also be applied to microorganisms such as yeast, fungi or bacteria.

[0590] The invention also provides a method for the production of transgenic plants having enhanced yield-related traits relative to control plants, comprising introduction and expression in a plant of any nucleic acid sequence encoding an RCA polypeptide as defined hereinabove. The terms “transgenic”, “transgene” or “recombinant” are as defined herein.

[0591] More specifically, the present invention provides a method for the production of transgenic plants having enhanced yield-related traits relative to control plants, which method comprises:
[0592] (i) introducing and expressing in a plant or plant cell a nucleic acid sequence encoding an RCA polypeptide; and
[0593] (ii) cultivating the plant cell under conditions promoting plant growth and development.

[0594] The nucleic acid sequence may be introduced directly into a plant cell or into the plant itself (including introduction into a tissue, organ or any other part of a plant). According to a preferred feature of the present invention, the nucleic acid sequence is preferably introduced into a plant by transformation, the term “introduction” or “transformation” being as defined herein.

[0595] In addition to the transformation of somatic cells, which then have to be regenerated into intact plants, it is also possible to transform the cells of plant meristems and in particular those cells which develop into gametes. In this case, the transformed gametes follow the natural plant development, giving rise to transgenic plants. Thus, for example, seeds of Arabidopsis are treated with agrobacteria and seeds are obtained from the developing plants of which a certain proportion is transformed and thus transgenic [Feldman, K A and Marks M D (1987). Mol Gen Genet 208:274-289; Feldmann K (1992). In: C Koncz, N-H Chua and J Shell, eds, Methods in Arabidopsis Research. Word Scientific, Singapore, pp. 274-289]. Alternative methods are based on the repeated removal of the inflorescences and incubation of the excision site in the center of the rosette with transformed agrobacteria, whereby transformed seeds can likewise be obtained at a later point in time (Chang (1994). Plant J. 5: 551-558; Katavic (1994). Mol Gen Genet, 245: 363-370). However, an especially effective method is the vacuum infiltration method with its modifications such as the “floral dip” method. In the case of vacuum infiltration of Arabidopsis, intact plants under reduced pressure are treated with an agrobacterial suspension [Bechthold, N (1993). C R Acad Sci Paris Life Sci, 316: 1194-1199], while in the case of the “floral dip” method the developing floral tissue is incubated briefly with a surfactant-treated agrobacterial suspension [Clough, S J and Bent, A F (1998). The Plant J. 16, 735-743]. A certain proportion of transgenic seeds are harvested in both cases, and these seeds can be distinguished from non-transgenic seeds by growing under the above-described selective conditions. In addition the stable transformation of plastids is of advantages because plastids are inherited maternally is most crops reducing or eliminating the risk of transgene flow through pollen. The transformation of the chloroplast genome is generally achieved by a process which has been schematically displayed in Klaus et al., 2004 [Nature Biotechnology 22 (2), 225-229]. Briefly the sequences to be transformed are cloned together with a selectable marker gene between flanking sequences homologous to the chloroplast genome. These homologous flanking sequences direct site specific integration into the plastome. Plastidal transformation has been described for many different plant species and an overview is given in Bock (2001) Transgenic plastids in basic research and plant biotechnology. J Mol Biol. 2001 Sep. 21; 312 (3):425-38 or Maliga, P (2003) Progress towards commercialization of plastid transformation technology. Trends Biotechnol. 21, 20-28. Further biotechnological progress has recently been reported in form of marker free plastid transformants, which can be produced by a transient co-integrated maker gene (Klaus et al., 2004, Nature Biotechnology 22(2), 225-229).

[0596] The genetically modified plant cells can be regenerated via any methods with which the skilled worker is familiar. Suitable methods can be found in the abovementioned publications by S. D. Kung and R. Wu, Potrykus or Höfgen and Willmitzer.

[0597] Generally after transformation, plant cells or cell groupings are selected for the presence of one or more markers which are encoded by plant-expressible genes co-transferred with the gene of interest, following which the transformed material is regenerated into a whole plant. To select transformed plants, the plant material obtained in the transformation is, as a rule, subjected to selective conditions so that transformed plants can be distinguished from untransformed plants. For example, the seeds obtained in the above-described manner can be planted and, after an initial growing period, subjected to a suitable selection by spraying. A further possibility consists in growing the seeds, if appropriate after sterilization, on agar plates using a suitable selection agent so that only the transformed seeds can grow into plants. Alternatively, the transformed plants are screened for the presence of a selectable marker such as the ones described above.

[0598] Following DNA transfer and regeneration, putatively transformed plants may also be evaluated, for instance using Southern analysis, for the presence of the gene of interest, copy number and/or genomic organisation. Alternatively or additionally, expression levels of the newly introduced DNA may be monitored using Northern and/or Western analysis, both techniques being well known to persons having ordinary skill in the art.

[0599] The generated transformed plants may be propagated by a variety of means, such as by clonal propagation or classical breeding techniques. For example, a first generation (or T1) transformed plant may be selfed and homozygous second-generation (or T2) transformants selected, and the T2 plants may then further be propagated through classical breeding techniques.

[0600] The generated transformed organisms may take a variety of forms. For example, they may be chimeras of transformed cells and non-transformed cells; clonal transformants (e.g., all cells transformed to contain the expression cassette); grafts of transformed and untransformed tissues (e.g., in plants, a transformed rootstock grafted to an untransformed scion).

[0601] The present invention clearly extends to any plant cell or plant produced by any of the methods described herein, and to all plant parts and propagules thereof. The present invention extends further to encompass the progeny of a primary transformed or transfected cell, tissue, organ or whole plant that has been produced by any of the aforementioned methods, the only requirement being that progeny exhibit the same genotypic and/or phenotypic characteristic(s) as those produced by the parent in the methods according to the invention.

[0602] The invention also includes host cells containing an isolated nucleic acid sequence encoding an RCA polypeptide as defined hereinabove. Preferred host cells according to the invention are plant cells.

[0603] Host plants for the nucleic acid sequences or the vector used in the method according to the invention, the expression cassette or construct or vector are, in principle, advantageously all plants, which are capable of synthesizing the polypeptides used in the inventive method.

[0604] A transgenic plant for the purposes of the invention is thus understood as meaning, as above, that the nucleic acid sequences used in the method of the invention are not at their natural locus in the genome of said plant, it being possible for the nucleic acid sequences to be expressed homologously or heterologously. However, as mentioned, transgenic also means that, while the nucleic acid sequences according to the invention or used in the inventive method are at their natural position in the genome of a plant, the sequence has been modified with regard to the natural sequence, and/or that the regulatory sequences of the natural sequences have been modified. Transgenic is preferably understood as meaning the expression of the nucleic acid sequences according to the invention at an unnatural locus in the genome, i.e. homologous or, preferably, heterologous expression of the nucleic acid sequences takes place. Preferred transgenic plants are mentioned herein.

[0605] The invention also extends to harvestable parts of a plant such as, but not limited to seeds, leaves, fruits, flowers, stems, rhizomes, tubers and bulbs. The invention furthermore relates to products derived, preferably directly derived, from a harvestable part of such a plant, such as dry pellets or powders, oil, fat and fatty acids, starch or proteins.

[0606] Methods for increasing expression of nucleic acid sequences or genes, or gene products, are well documented in the art and include, for example, overexpression driven by appropriate promoters, the use of transcription enhancers or translation enhancers. Isolated nucleic acid sequences which serve as promoter or enhancer elements may be introduced in an appropriate position (typically upstream) of a non-heterologous form of a polynucleotide so as to upregulate expression. For example, endogenous promoters may be altered in vivo by mutation, deletion, and/or substitution (see, Kmiec, U.S. Pat. No. 5,565,350; Zarling et al., PCT/US93/03868), or isolated promoters may be introduced into a plant cell in the proper orientation and distance from a gene of the present invention so as to control the expression of the gene.

[0607] The term “expression” or “gene expression” means the transcription of a specific gene or specific genes or specific genetic construct. The term “expression” or “gene expression” in particular means the transcription of a gene or genes or genetic construct into structural RNA (rRNA, tRNA) or mRNA with or without subsequent translation of the latter into a protein. The process includes transcription of DNA and processing of the resulting mRNA product.

[0608] The term “increasing expression” shall mean an increase of the expression of the nucleic acid sequence encoding an RCA polypeptide, which increase in expression leads to enhanced yield-related traits of the plants relative to control plants. Preferably, the increase in expression of the nucleic acid is 1.25, 1.5, 1.75, 2, 5, 7.5, 10, 15, 20, 25, 30, 35, 40, 45, 50, 55, 60, 65, 70, 75, 80, 85, 90, 95, 100 or more fold the expression of the endogenous plant RCA polypeptide.

[0609] By increasing the expression (in a plastid) of a nucleic acid sequence encoding an RCA polypeptide, an increase in the amount of RCA polypeptide is obtained. This increase in amount of RCA polypeptide (in a plastid) leads to an increase in RCA activity. Alternatively, activity may also be increased when there is no change in the amount of an RCA polypeptide, or even when there is a reduction in the amount of an RCA polypeptide. This may occur when the intrinsic properties of the polypeptide are altered, for example, by making mutant versions that are more active than the naturally-occurring polypeptide.

[0610] The expression of a nucleic acid sequence encoding an RCA polypeptide is increased in a plastid using techniques well known in the art, such as by targeting an RCA polypeptide to the plastid using transit peptide sequences or by direct transformation of an RCA polypeptide without transit peptide sequences, into a plastid. Expression may be increased in any plastid, however, preferred is preferentially increasing expression in a chloroplast.

[0611] If polypeptide expression is desired, it is generally desirable to include a polyadenylation region at the 3′-end of a polynucleotide coding region. The polyadenylation region can be derived from the natural gene, from a variety of other plant genes, or from T-DNA. The 3′ end sequence to be added may be derived from, for example, the nopaline synthase or octopine synthase genes, or alternatively from another plant gene, or less preferably from any other eukaryotic gene.

[0612] An intron sequence may also be added as described above.

[0613] Other control sequences (besides promoter, enhancer, silencer, intron sequences, 3′UTR and/or 5′UTR regions) may be protein and/or RNA stabilizing elements.

[0614] As mentioned above, a preferred method for increasing expression of a nucleic acid sequence encoding an RCA polypeptide is by introducing and expressing in a plant a nucleic acid sequence encoding an RCA polypeptide; however the effects of performing the method, i.e. enhancing yield-related traits may also be achieved using other well known techniques. A description of some of these techniques will now follow.

[0615] One such technique is T-DNA activation tagging (Hayashi et al. Science (1992) 1350-1353), which involves insertion of T-DNA, usually containing a promoter (may also be a translation enhancer or an intron), in the genomic region of the gene of interest or 10 kb up- or downstream of the coding region of a gene in a configuration such that the promoter directs expression of the targeted gene. Typically, regulation of expression of the targeted gene by its natural promoter is disrupted and the gene falls under the control of the newly introduced promoter. The promoter is typically embedded in a T-DNA. This T-DNA is randomly inserted into the plant genome, for example, through Agrobacterium infection and leads to modified expression of genes near the inserted T-DNA. The resulting transgenic plants show dominant phenotypes due to modified expression of genes close to the introduced promoter.

[0616] The effects of the invention may also be reproduced using the technique of TILLING (Targeted Induced Local Lesions In Genomes). This is a mutagenesis technology useful to generate and/or identify a nucleic acid sequence encoding an RCA polypeptide with modified expression and/or activity. TILLING also allows selection of plants carrying such mutant variants. These mutant variants may exhibit modified expression, either in strength or in location or in timing (if the mutations affect the promoter for example). These mutant variants may exhibit higher RCA polypeptide activity than that exhibited by the gene in its natural form. TILLING combines high-density mutagenesis with high-throughput screening methods. The steps typically followed in TILLING are: (a) EMS mutagenesis (Redei G P and Koncz C (1992) In Methods in Arabidopsis Research, Koncz C, Chua N H, Schell J, eds. Singapore, World Scientific Publishing Co, pp. 16-82; Feldmann et al., (1994) In Meyerowitz E M, Somerville C R, eds, Arabidopsis. Cold Spring Harbor Laboratory Press, Cold Spring Harbor, N.Y., pp 137-172; Lightner J and Caspar T (1998) In J Martinez-Zapater, J Salinas, eds, Methods on Molecular Biology, Vol. 82. Humana Press, Totowa, N.J., pp 91-104); (b) DNA preparation and pooling of individuals; (c) PCR amplification of a region of interest; (d) denaturation and annealing to allow formation of heteroduplexes; (e) DHPLC, where the presence of a heteroduplex in a pool is detected as an extra peak in the chromatogram; (f) identification of the mutant individual; and (g) sequencing of the mutant PCR product. Methods for TILLING are well known in the art (McCallum et al., (2000) Nat Biotechnol 18: 455-457; reviewed by Stemple (2004) Nat Rev Genet 5(2): 145-50).

[0617] The effects of the invention may also be reproduced using homologous recombination, which allows introduction in a genome of a selected nucleic acid sequence at a defined selected position. Homologous recombination is a standard technology used routinely in biological sciences for lower organisms such as yeast or the moss Physcomitrella. Methods for performing homologous recombination in plants have been described not only for model plants (Offring a et al. (1990) EMBO J 9(10): 3077-84) but also for crop plants, for example rice (Terada et al. (2002) Nat Biotech 20(10): 1030-4; Iida and Terada (2004) Curr Opin Biotech 15(2): 132-8).

[0618] Reference herein to enhanced yield-related traits is taken to mean an increase in biomass (weight) of one or more parts of a plant, which may include aboveground (harvestable) parts and/or (harvestable) parts below ground. In particular, such harvestable parts are seeds, and performance of the methods of the invention results in plants having increased seed yield relative to the seed yield of control plants. The term “yield” and “seed yield” is as defined herein. The terms “increased”, “improved”, “enhanced” are as defined herein.

[0619] In particular, the enhanced yield-related trait is selected from one or more of the following: (i) increased early vigour; (ii) increased aboveground biomass; (iii) earlier time to flower; (iv) increased number of (filled) seeds; and (v) increased TKW.

[0620] Taking corn as an example, a yield increase may be manifested as one or more of the following: increase in the number of plants established per hectare or acre, an increase in the number of ears per plant, an increase in the number of rows, number of kernels per row, kernel weight, thousand kernel weight, ear length/diameter, increase in the seed filling rate (which is the number of filled seeds divided by the total number of seeds and multiplied by 100), among others. Taking rice as an example, a yield increase may manifest itself as an increase in one or more of the following: number of plants per hectare or acre, number of panicles per plant, number of spikelets per panicle, number of flowers (florets) per panicle (which is expressed as a ratio of the number of filled seeds over the number of primary panicles), increase in the seed filling rate (which is the number of filled seeds divided by the total number of seeds and multiplied by 100), increase in thousand kernel weight, among others.

[0621] Enhanced yield-related traits may also result in modified architecture, or may occur because of modified architecture.

[0622] Since the transgenic plants according to the present invention have enhanced yield-related traits, it is likely that these plants exhibit an increased growth rate (during at least part of their life cycle), relative to the growth rate of control plants at a corresponding stage in their life cycle. The increased growth rate may be specific to one or more parts of a plant (including seeds), or may be throughout substantially the whole plant. Plants having an increased growth rate may have a shorter life cycle. The life cycle of a plant may be taken to mean the time needed to grow from a dry mature seed up to the stage where the plant has produced dry mature seeds, similar to the starting material. This life cycle may be influenced by factors such as early vigour, growth rate, greenness index, flowering time and speed of seed maturation. The increase in growth rate may take place at one or more stages in the life cycle of a plant or during substantially the whole plant life cycle. Increased growth rate during the early stages in the life cycle of a plant may reflect enhanced vigour. The increase in growth rate may alter the harvest cycle of a plant allowing plants to be sown later and/or harvested sooner than would otherwise be possible (a similar effect may be obtained with earlier flowering time). If the growth rate is sufficiently increased, it may allow for the further sowing of seeds of the same plant species (for example sowing and harvesting of rice plants followed by sowing and harvesting of further rice plants all within one conventional growing period). Similarly, if the growth rate is sufficiently increased, it may allow for the further sowing of seeds of different plants species (for example the sowing and harvesting of corn plants followed by, for example, the sowing and optional harvesting of soy bean, potato or any other suitable plant). Harvesting additional times from the same rootstock in the case of some crop plants may also be possible. Altering the harvest cycle of a plant may lead to an increase in annual biomass production per acre (due to an increase in the number of times (say in a year) that any particular plant may be grown and harvested). An increase in growth rate may also allow for the cultivation of transgenic plants in a wider geographical area than their wild-type counterparts, since the territorial limitations for growing a crop are often determined by adverse environmental conditions either at the time of planting (early season) or at the time of harvesting (late season). Such adverse conditions may be avoided if the harvest cycle is shortened. The growth rate may be determined by deriving various parameters from growth curves, such parameters may be: T-Mid (the time taken for plants to reach 50% of their maximal size) and T-90 (time taken for plants to reach 90% of their maximal size), amongst others.

[0623] According to a preferred feature of the present invention, performance of the methods of the invention gives plants having an increased growth rate relative to control plants. Therefore, according to the present invention, there is provided a method for increasing the growth rate of plants, which method comprises increasing expression in a plant of a nucleic acid sequence encoding an RCA polypeptide as defined herein.

[0624] Enhanced yield-related traits and/or increased growth rate occurs whether the plant is under non-stress conditions or whether the plant is exposed to various stresses compared to control plants. Plants typically respond to exposure to stress by growing more slowly. In conditions of severe stress, the plant may even stop growing altogether. Mild stress on the other hand is defined herein as being any stress to which a plant is exposed which does not result in the plant ceasing to grow altogether without the capacity to resume growth. Mild stress in the sense of the invention leads to a reduction in the growth of the stressed plants of less than 40%, 35% or 30%, preferably less than 25%, 20% or 15%, more preferably less than 14%, 13%, 12%, 11% or 10% or less in comparison to the control plant under non-stress conditions. Due to advances in agricultural practices (irrigation, fertilization, pesticide treatments) severe stresses are not often encountered in cultivated crop plants. As a consequence, the compromised growth induced by mild stress is often an undesirable feature for agriculture. Mild stresses are the everyday biotic and/or abiotic (environmental) stresses to which a plant is exposed. Abiotic stresses may be due to drought or excess water, anaerobic stress, salt stress, chemical toxicity, oxidative stress and hot, cold or freezing temperatures. The abiotic stress may be an osmotic stress caused by a water stress (particularly due to drought), salt stress, oxidative stress or an ionic stress. Biotic stresses are typically those stresses caused by pathogens, such as bacteria, viruses, fungi and insects.

[0625] In particular, the methods of the present invention may be performed under non-stress conditions or under conditions of mild drought to give plants having enhanced yield-related traits relative to control plants. As reported in Wang et al. (Planta (2003) 218: 1-14), abiotic stress leads to a series of morphological, physiological, biochemical and molecular changes that adversely affect plant growth and productivity. Drought, salinity, extreme light conditions (low or high or of variable wavelength) extreme temperatures (high or low) and oxidative stress are known to be interconnected and may induce growth and cellular damage through similar mechanisms. Rabbani et al. (Plant Physiol (2003) 133: 1755-1767) describes a particularly high degree of “cross talk” between drought stress and high-salinity stress. For example, drought and/or salinisation are manifested primarily as osmotic stress, resulting in the disruption of homeostasis and ion distribution in the cell. Oxidative stress, which frequently accompanies high or low temperature, salinity or drought stress, may cause denaturing of functional and structural proteins. As a consequence, these diverse environmental stresses often activate similar cell signaling pathways and cellular responses, such as the production of stress proteins, up-regulation of anti-oxidants, accumulation of compatible solutes and growth arrest. The term “non-stress” conditions as used herein are those environmental conditions that allow optimal growth of plants. Persons skilled in the art are aware of normal soil conditions and climatic conditions for a given location.

[0626] Performance of the methods of the invention gives plants grown under non-stress conditions or under mild drought conditions enhanced yield-related traits relative to suitable control plants grown under comparable conditions. Therefore, according to the present invention, there is provided a method for enhancing yield-related traits in plants grown under non-stress conditions or under mild drought conditions, which method comprises increasing expression in a plant of a nucleic acid sequence encoding an RCA polypeptide.

[0627] In a preferred embodiment of the invention, the enhancement of yield-related traits and/or increase in growth rate occurs according to the methods of the present invention under non-stress conditions.

[0628] Performance of the methods according to the present invention results in plants grown under abiotic stress conditions having increased yield-related traits relative to control plants grown under comparable stress conditions. As reported in Wang et al. (Planta (2003) 218: 1-14), abiotic stress leads to a series of morphological, physiological, biochemical and molecular changes that adversely affect plant growth and productivity. Drought, salinity, extreme temperatures and oxidative stress are known to be interconnected and may induce growth and cellular damage through similar mechanisms. Rabbani et al. (Plant Physiol (2003) 133: 1755-1767) describes a particularly high degree of “cross talk” between drought stress and high-salinity stress. For example, drought and/or salinisation are manifested primarily as osmotic stress, resulting in the disruption of homeostasis and ion distribution in the cell. Oxidative stress, which frequently accompanies high or low temperature, salinity or drought stress, may cause denaturing of functional and structural proteins. As a consequence, these diverse environmental stresses often activate similar cell signalling pathways and cellular responses, such as the production of stress proteins, up-regulation of anti-oxidants, accumulation of compatible solutes and growth arrest. Since diverse environmental stresses activate similar pathways, the exemplification of the present invention with drought stress should not be seen as a limitation to drought stress, but more as a screen to indicate the involvement of RCA polypeptides as defined above, in increasing yield-related traits relative to control plants grown in comparable stress conditions, in abiotic stresses in general.

[0629] The term “abiotic stress” as defined herein is taken to mean any one or more of: water stress (due to drought or excess water), anaerobic stress, salt stress, temperature stress (due to hot, cold or freezing temperatures), chemical toxicity stress and oxidative stress. According to one aspect of the invention, the abiotic stress is an osmotic stress, selected from water stress, salt stress, oxidative stress and ionic stress. Preferably, the water stress is drought stress. The term salt stress is not restricted to common salt (NaCl), but may be any stress caused by one or more of: NaCl, KCl, LiCl, MgCl₂, CaCl₂, amongst others.

[0630] Performance of the methods of the invention gives plants having increased yield-related traits, under abiotic stress conditions relative to control plants grown in comparable stress conditions. Therefore, according to the present invention, there is provided a method for increasing yield-related traits, in plants grown under abiotic stress conditions, which method comprises increasing expression in a plant of a nucleic acid sequence encoding an RCA polypeptide. According to one aspect of the invention, the abiotic stress is an osmotic stress, selected from one or more of the following: water stress, salt stress, oxidative stress and ionic stress.

[0631] Another example of abiotic environmental stress is the reduced availability of one or more nutrients that need to be assimilated by the plants for growth and development. Because of the strong influence of nutrition utilization efficiency on plant yield and product quality, a huge amount of fertilizer is poured onto fields to optimize plant growth and quality. Productivity of plants ordinarily is limited by three primary nutrients, phosphorous, potassium and nitrogen, which is usually the rate-limiting element in plant growth of these three. Therefore the major nutritional element required for plant growth is nitrogen (N). It is a constituent of numerous important compounds found in living cells, including amino acids, proteins (enzymes), nucleic acids, and chlorophyll. 1.5% to 2% of plant dry matter is nitrogen and approximately 16% of total plant protein. Thus, nitrogen availability is a major limiting factor for crop plant growth and production (Frink et al. (1999) Proc Natl Acad Sci USA 96(4): 1175-1180), and has as well a major impact on protein accumulation and amino acid composition. Therefore, of great interest are crop plants with increased yield-related traits, when grown under nitrogen-limiting conditions.

[0632] Performance of the methods of the invention gives plants grown under conditions of reduced nutrient availability, particularly under conditions of reduced nitrogen availability, having increased yield-related traits relative to control plants grown under comparable conditions. Therefore, according to the present invention, there is provided a method for increasing yield-related traits in plants grown under conditions of reduced nutrient availability, preferably reduced nitrogen availability, which method comprises increasing expression in a plant of a nucleic acid sequence encoding an RCA polypeptide. Reduced nutrient availability may result from a deficiency or excess of nutrients such as nitrogen, phosphates and other phosphorous-containing compounds, potassium, calcium, cadmium, magnesium, manganese, iron and boron, amongst others. Preferably, reduced nutrient availability is reduced nitrogen availability.

[0633] The methods of the invention are advantageously applicable to any plant, the term “plant” being as defined herein.

[0634] According to a preferred embodiment of the present invention, the plant is a crop plant. Examples of crop plants include soybean, sunflower, canola, alfalfa, rapeseed, cotton, tomato, potato and tobacco. Further preferably, the plant is a monocotyledonous plant. Examples of monocotyledonous plants include sugarcane. More preferably the plant is a cereal. Examples of cereals include rice, maize, wheat, barley, millet, rye, sorghum and oats.

[0635] The present invention also encompasses use of nucleic acid sequences encoding an RCA polypeptide described herein and use of these RCA polypeptides in enhancing yield-related traits in plants.

[0636] Nucleic acid sequences encoding an RCA polypeptide as described herein, or the RCA polypeptides themselves, may find use in breeding programmes in which a DNA marker is identified which may be genetically linked to a gene encoding an RCA polypeptide. The genes/nucleic acid sequences, or the RCA polypeptides themselves may be used to define a molecular marker. This DNA or polypeptide marker may then be used in breeding programmes to select plants having enhanced yield-related traits as defined hereinabove in the methods of the invention.

[0637] Allelic variants of a gene/nucleic acid sequence encoding an RCA polypeptide may also find use in marker-assisted breeding programmes. Such breeding programmes sometimes require introduction of allelic variation by mutagenic treatment of the plants, using for example EMS mutagenesis; alternatively, the programme may start with a collection of allelic variants of so called “natural” origin caused unintentionally. Identification of allelic variants then takes place, for example, by PCR. This is followed by a step for selection of superior allelic variants of the sequence in question, and which give enhanced yield-related traits. Selection is typically carried out by monitoring growth performance of plants containing different allelic variants of the sequence in question. Growth performance may be monitored in a greenhouse or in the field. Further optional steps include crossing plants in which the superior allelic variant was identified with another plant. This could be used, for example, to make a combination of interesting phenotypic features.

[0638] Nucleic acid sequences encoding an RCA polypeptide may also be used as probes for genetically and physically mapping the genes that they are a part of, and as markers for traits linked to those genes. Such information may be useful in plant breeding in order to develop lines with desired phenotypes. Such use of nucleic acid sequences encoding an RCA polypeptide requires only a nucleic acid sequence of at least 15 nucleotides in length. The nucleic acid sequences encoding an RCA polypeptide may be used as restriction fragment length polymorphism (RFLP) markers. Southern blots (Sambrook J, Fritsch E F and Maniatis T (1989) Molecular Cloning, A Laboratory Manual) of restriction-digested plant genomic DNA may be probed with the nucleic acid sequences encoding an RCA polypeptide. The resulting banding patterns may then be subjected to genetic analyses using computer programs such as MapMaker (Lander et al. (1987) Genomics 1: 174-181) in order to construct a genetic map. In addition, the nucleic acid sequences may be used to probe Southern blots containing restriction endonuclease-treated genomic DNAs of a set of individuals representing parent and progeny of a defined genetic cross. Segregation of the DNA polymorphisms is noted and used to calculate the position of the nucleic acid sequence encoding an RCA polypeptide in the genetic map previously obtained using this population (Botstein et al. (1980) Am. J. Hum. Genet. 32:314-331).

[0639] The production and use of plant gene-derived probes for use in genetic mapping is described in Bernatzky and Tanksley (1986) Plant Mol. Biol. Reporter 4: 37-41. Numerous publications describe genetic mapping of specific cDNA clones using the methodology outlined above or variations thereof. For example, F2 intercross populations, backcross populations, randomly mated populations, near isogenic lines, and other sets of individuals may be used for mapping. Such methodologies are well known to those skilled in the art.

[0640] The nucleic acid probes may also be used for physical mapping (i.e., placement of sequences on physical maps; see Hoheisel et al. In: Non-mammalian Genomic Analysis: A Practical Guide, Academic press 1996, pp. 319-346, and references cited therein).

[0641] In another embodiment, the nucleic acid probes may be used in direct fluorescence in situ hybridisation (FISH) mapping (Trask (1991) Trends Genet. 7:149-154). Although current methods of FISH mapping favour use of large clones (several kb to several hundred kb; see Laan et al. (1995) Genome Res. 5:13-20), improvements in sensitivity may allow performance of FISH mapping using shorter probes.

[0642] A variety of nucleic acid amplification-based methods for genetic and physical mapping may be carried out using the nucleic acid sequences. Examples include allele-specific amplification (Kazazian (1989) J. Lab. Clin. Med 11:95-96), polymorphism of PCR-amplified fragments (CAPS; Sheffield et al. (1993) Genomics 16:325-332), allele-specific ligation (Landegren et al. (1988) Science 241:1077-1080), nucleotide extension reactions (Sokolov (1990) Nucleic Acid Res. 18:3671), Radiation Hybrid Mapping (Walter et al. (1997) Nat. Genet. 7:22-28) and Happy Mapping (Dear and Cook (1989) Nucleic Acid Res. 17:6795-6807). For these methods, the sequence of a nucleic acid is used to design and produce primer pairs for use in the amplification reaction or in primer extension reactions. The design of such primers is well known to those skilled in the art. In methods employing PCR-based genetic mapping, it may be necessary to identify DNA sequence differences between the parents of the mapping cross in the region corresponding to the instant nucleic acid sequence. This, however, is generally not necessary for mapping methods.

[0643] The methods according to the present invention result in plants having enhanced yield-related traits, as described hereinbefore. These traits may also be combined with other economically advantageous traits, such as further yield-enhancing traits, tolerance to other abiotic and biotic stresses, traits modifying various architectural features and/or biochemical and/or physiological features.

### DESCRIPTION OF FIGURES

[0644] The present invention will now be described with reference to the following figures in which:

[0645] FIG. 1 shows the domain structure of the CCA1 protein represented by SEQ ID NO: 2. The SANT domain is given in bold underlined. Motifs 1 and 2 in the SANT domain are indicated in bold italics and underlined. Motifs 3, 4 and 5 are indicated in italics and underlined.

[0646] FIG. 2 shows a phylogenetic tree and a multiple alignment of CCA1 proteins. The motifs indicated in FIG. 1 can easily be recognised, and new motifs may be defined using this alignment.

[0647] FIG. 3 shows the binary vector for increased expression in Oryza sativa of an Arabidopsis thaliana CCA1-like protein-encoding nucleic acid under the control of a GOS2 promoter.

[0648] FIG. 4 details examples of CCA1 sequences useful in performing the methods according to the present invention.

[0649] FIG. 5 shows the domain structure of a gamma VPE. FIG. 5A is a schematic representation in which (from left to right) the diagonally stripped box represents a signal peptide for insertion into the endomembrane system; the white box represents an N-terminal inhibitory domain; the dotted box represents an active domain; and the grey shaded box represents the carboxy inhibitory domain. The positions of the Hystidine-Cystein catalytic dyad is marked “H” and “C”. FIG. 5B shows the position of the domains over a sequence alignment between a castor bean VPE and SEQ ID NO: 150. The double line represents the signal peptide, the solid black line represents the active peptide; the black arrows indicate the putative aspartic residues at which autocatalytic processing occurs to produce the mature active peptide and the conserved Hys and Cys residues are boxed. Underlined with dots is the conserved active pentapeptide in caspases.

[0650] FIG. 6 shows (A) a phylogenetic tree of polypeptides of the peptidase superfamily. VPE peptidases cluster apart of peptidases in clans CA, CF or CE. VPE polypeptides cluster in four subclasses, alpha, beta, gamma and delta, with alpha and gamma being the closest related; (B) is an alignment of VPEs; the highest sequence conservation is found in the peptidase domain.

[0651] FIG. 7 shows the binary vector for increased expression in Oryza sativa of an Arabidopsis thaliana VPE-encoding nucleic acid under the control of the rice-WSI18 gene promoter.

[0652] FIG. 8 shows VPE sequences useful in the methods of the invention.

[0653] FIG. 9 shows the domain structure and their respective positions in a SAP-like polypeptide, with Motif 1 being the SAP-like domain.

[0654] FIG. 10 shows a phylogenetic tree and sequence alignment of SAP and SAP-like polypeptides. The clade with SAP polypeptides is boxed in a single line; the double line boxes the clades with SAP-like polypeptides. FIG. 10B shows an alignment of SAP-like polypeptides.

[0655] FIG. 11 shows the binary vector for increased expression in Oryza sativa of an Oryza sativa SAP-like protein-encoding nucleic acid under the control of the rice RCC3 promoter (pRCC3).

[0656] FIG. 12 details examples of SAP sequences useful in performing the methods according to the present invention.

[0657] FIG. 13 shows a model for RCA activation of RuBisCO. The sugar phosphate inhibitors bind to the active site of the RuBisCo large subunits, thereby closing them. RCA via ATP hydrolysis will oligomerise and bind to Rubisco to form a supercomplex consisting of the large and small RuBisCo subunits encircled by the 16 RCA subunits. This binding is responsible for conformational changes that will lead to a release of the individual RCA subunits, a release of the inhibitors, and an opening of the RuBisCo active sites (for more detailed explanations, see in Portis (2003) Photosynthesis Research 75:11-27).

[0658] FIG. 14 represents a drawing of the important features comprised in an RCA polypeptide, i.e., a transit peptide for plastidic targeting, an AAA domain, and a P loop triphosphate-binding loop consensus sequence G(G/R)KG(Q/E)GK(S/T), for nucleotide binding, corresponding to Motif1 as represented by SEQ ID NO: 312.

[0659] FIG. 15 shows an alignment of RCA polypeptides. The sequences were aligned using AlignX program from Vector NTI suite (InforMax, Bethesda, Md.). Multiple alignment was done with a gap opening penalty of 10 and a gap extension of 0.01. The beginning of sequence conservation between eukaryotic RCA polypeptides is delineated with a bracket (the amino acid sequence N-terminal upstream of this bracket is considered as comprising the transit peptide for plastidic subcellular targeting), as are the beginning and the end of the AAA domain. The P loop is boxed, and corresponds to Motif 1 as represented by SEQ ID NO: 312. The beginning of the C-terminal extension is also marker with a bracket.

[0660] FIG. 16 shows the binary vector for increased expression in Oryza sativa of a nucleic acid sequence encoding a Chlamydomonas reinhardtii RCA polypeptide under the control of a constitutive promoter, or under the control of a green tissue-specific promoter.

[0661] FIG. 17 details examples of RCA sequences useful in performing the methods according to the present invention.

[0662] FIG. 18 shows the sequence of SEQ ID NO: 322 with underlined F-rich (phenylalanine-rich) and C-rich (cysteine-rich) regions. Within the boxes are the four regions of so-called intrinsic disorder.

[0663] FIG. 19 shows a CLUSTAL W multiple sequence alignment of SYPF1 polypeptides from various species. Conserved regions, shown as Motifs I, II and III are boxed.

[0664] FIG. 20 shows a phylogenetic tree comprising SYP1 polypeptide sequences. Sequences clustering with the sequence of SEQ ID NO: 322 may be useful in performing the methods of the invention.

[0665] FIG. 21 shows the binary vector for increased expression in Oryza sativa of an Arabidopsis thaliana SYPF1 protein-encoding nucleic acid under the control of a HMG promoter.

[0666] FIG. 22 details examples of SYPF1 sequences useful in performing the methods according to the present invention.

### EXAMPLES

[0667] The present invention will now be described with reference to the following examples, which are by way of illustration alone. The following examples are not intended to completely define or to otherwise limit the scope of the invention.

### Part I. CCA1

### Example 1

### Identification of Sequences Related to the CCA1 of SEQ ID NO: 1 and SEQ ID NO: 2

[0668] Sequences (full length cDNA, ESTs or genomic) related to SEQ ID NO: 1 and/or protein sequences related to SEQ ID NO: 2 were identified amongst those maintained in the Entrez Nucleotides database at the National Center for Biotechnology Information (NCBI) using database sequence search tools, such as the Basic Local Alignment Tool (BLAST) (Altschul et al. (1990) J. Mol. Biol. 215:403-410; and Altschul et al. (1997) Nucleic Acids Res. 25:3389-3402). The program was used to find regions of local similarity between sequences by comparing nucleic acid or polypeptide sequences to sequence databases and by calculating the statistical significance of matches. The polypeptide encoded by SEQ ID NO: 1 was used for the TBLASTN algorithm, with default settings and the filter to ignore low complexity sequences set off. The output of the analysis was viewed by pairwise comparison, and ranked according to the probability score (E-value), where the score reflects the probability that a particular alignment occurs by chance (the lower the E-value, the more significant the hit). In addition to E-values, comparisons were also scored by percentage identity. Percentage identity refers to the number of identical nucleotides (or amino acids) between the two compared nucleic acid (or polypeptide) sequences over a particular length. In some instances, the default parameters may be adjusted to modify the stringency of the search.

[0669] Table A provides a list of nucleic acid and protein sequences related to the nucleic acid sequence as represented by SEQ ID NO: 1 and the protein sequence represented by SEQ ID NO: 2.

TABLE A
Nucleic acid sequences related to the nucleic acid sequence (SEQ ID NO: 1) useful
in the methods of the present invention, and the corresponding deduced polypeptides.

| | | | | Database | |
|---|---|---|---|---|---|
| | | Nucleic acid | Polypeptide | accession | |
| Name | Source organism | SEQ ID NO: | SEQ ID NO: | number | Status |
| CCA1-like | Arabidopsis thaliana | 1 | 2 | / | Full length |
| MYB TF At1g01060 | Arabidopsis thaliana | 3 | 4 | AY519507 | Full length |
| Icl1 | Arabidopsis thaliana | 5 | 6 | AJ937209 | Full length |
| Icl2 | Arabidopsis thaliana | 7 | 8 | AJ937210 | Full length |
| Icl3 | Arabidopsis thaliana | 9 | 10 | AJ937211 | Full length |
| Icl4 | Arabidopsis thaliana | 11 | 12 | AJ937212 | Full length |
| Icl5 | Arabidopsis thaliana | 13 | 14 | AJ937213 | Full length |
| MYB TF At1g18330 | Arabidopsis thaliana | 15 | 16 | AY550299 | Full length |
| Myb-TF At1g19000 | Arabidopsis thaliana | 17 | 18 | AY079415 | Full length |
| MYB TF At1g70000 | Arabidopsis thaliana | 19 | 20 | AY519509 | Full length |
| MYB TF At1g74840 | Arabidopsis thaliana | 21 | 22 | AY519510 | Full length |
| MYB TF AT3G10113 | Arabidopsis thaliana | 23 | 24 | NM_148701 | Full length |
| MYB TF AT3G10580 | Arabidopsis thaliana | 25 | 26 | NM_111894 | Full length |
| MYB TF At3g10590 | Arabidopsis thaliana | 27 | 28 | AY550300 | Full length |
| MYB TF At3g16350 | Arabidopsis thaliana | 29 | 30 | AY519512 | Full length |
| MYB TF At4g09450 | Arabidopsis thaliana | 31 | 32 | AY122911 | Full length |
| MYB TF At5g37260 | Arabidopsis thaliana | 33 | 34 | AY519515 | Full length |
| MYB TF At5g47390 | Arabidopsis thaliana | 35 | 36 | AY519516 | Full length |
| MYB TF At5g56840 | Arabidopsis thaliana | 37 | 38 | AY519517 | Full length |
| MYB TF AT5G61620 | Arabidopsis thaliana | 39 | 40 | NM_125556 | Full length |
| MYB TF | Oryza sativa | 41 | 42 | LOC_Os01g06320 | Full length |
| MYB TF | Oryza sativa | 43 | 44 | LOC_Os01g09280 | Full length |
| MYB TF | Oryza sativa | 45 | 46 | LOC_Os01g09640 | Full length |
| MYB TF | Oryza sativa | 47 | 48 | LOC_Os01g41900 | Full length |
| MYB TF | Oryza sativa | 49 | 50 | LOC_Os02g30700 | Full length |
| MYB TF | Oryza sativa | 51 | 52 | LOC_Os05g07010 | Full length |
| MYB TF | Oryza sativa | 53 | 54 | LOC_Os05g10690 | Full length |
| MYB TF | Oryza sativa | 55 | 56 | LOC_Os05g51160 | Full length |
| MYB TF | Oryza sativa | 57 | 58 | LOC_Os06g07640 | Full length |
| MYB TF | Oryza sativa | 59 | 60 | LOC_Os06g07650 | Full length |
| MYB TF | Oryza sativa | 61 | 62 | LOC_Os06g07700 | Full length |
| MYB TF | Oryza sativa | 63 | 64 | LOC_Os06g07740 | Full length |
| MYB TF | Oryza sativa | 65 | 66 | LOC_Os06g45840 | Full length |
| MYB TF | Oryza sativa | 67 | 68 | LOC_Os08g04840 | Full length |
| MYB TF | Oryza sativa | 69 | 70 | LOC_Os08g05510 | Full length |
| MYB TF | Oryza sativa | 71 | 72 | LOC_Os08g06110 | Full length |
| MYB TF | Oryza sativa | 73 | 74 | LOC_Os10g41200 | Full length |
| MYB TF | Oryza sativa | 75 | 76 | LOC_Os10g41260 | Full length |
| MYB TF | Oryza sativa | 77 | 78 | LOC_Os02g46030 | Full length |
| MYB TF | Oryza sativa | 79 | 80 | LOC_Os04g49450 | Full length |
| MYB TF | Oryza sativa | 81 | 82 | LOC_Os06g51260 | Full length |
| LpLHY H1 | Lemna paucicostata | 83 | 84 | AB210845 | Full length |
| LgLHY H1 | Lemna gibba | 85 | 86 | AB210849 | Full length |
| MYB TF | Castanea sativa | 87 | 88 | AY611029 | Full length |
| MYB TF | Phaseolus vulgaris | 89 | 90 | AJ420902 | Full length |
| MYB114 | Glycine max | 91 | 92 | DQ822977 | partial |
| CCA1-like | Mesembryanthemum | 93 | 94 | AY371287 | Full length |
| | crystallinum | | | | |
| MYB clone 114030R | Lycopersicon esculentum | 95 | 96 | BT012912 | Full length |
| MYB186 | Glycine max | 97 | 98 | DQ822982 | partial |
| LgLHY H2 | Lemna gibba | 99 | 100 | AB210850 | Full length |
| MYB PCO118792 | Zea mays | 101 | 102 | AY103618 | Full length |
| LpLHY H2 | Lemna paucicostata | 103 | 104 | AB210846 | Full length |
| MYB177 | Glycine max | 105 | 106 | DQ822925 | Full length |
| MYB clone | Triticum aestivum | 107 | 108 | BT009406 | Full length |
| wlm96.pk054.b21:fis | | | | | |
| MYB173 | Glycine max | 109 | 110 | DQ822922 | Full length |
| MYB140 | Glycine max | 111 | 112 | DQ822986 | partial |
| MYB131 | Glycine max | 113 | 114 | DQ822983 | partial |
| MYB144 | Glycine max | 115 | 116 | DQ822987 | partial |
| MYB174 | Glycine max | 117 | 118 | DQ822939 | partial |
| LHY-like | Ostreococcus tauri | 119 | 120 | AY740076 | partial |
| MYB, clone mth2- | Medicago truncatula | 121 | 122 | AC150443 | partial |
| 71o19 | | | | | |
| MYBR5 | Malus x domestica | 123 | 124 | DQ074476 | Full length |
| MYB, clone | Triticum aestivum | 125 | 126 | BT008954 | Full length |
| wdk1c.pk011.f12:fis, | | | | | |
| MYB148 | Glycine max | 127 | 128 | DQ822956 | partial |
| MYB135 | Glycine max | 129 | 130 | DQ822955 | partial |
| Myb2 | Pisum sativum | 131 | 132 | AY826731 | partial |
| MYB133 | Glycine max | 133 | 134 | DQ822916 | Full length |
| MYB146 | Glycine max | 135 | 136 | DQ822984 | partial |
| MYB155 | Glycine max | 137 | 138 | DQ822940 | partial |
| MYB118 | Glycine max | 139 | 140 | DQ822912 | Full length |

### Example 2

### Alignment of Relevant Polypeptide Sequences

[0670] AlignX from the Vector NTI (Invitrogen) is based on the Clustal algorithm of progressive alignment (Thompson et al. (1997) Nucleic Acids Res 25:4876-4882; Chenna et al. (2003). Nucleic Acids Res 31:3497-3500). A phylogenetic tree can be constructed using a neighbour-joining clustering algorithm. Default values are for the gap open penalty of 10, for the gap extension penalty of 0.1 and the selected weight matrix is Blosum 62 (if polypeptides are aligned).

[0671] The result of the multiple sequence alignment using polypeptides relevant in identifying the ones useful in performing the methods of the invention is shown in FIG. 2. A selection of the sequences used for the multiple alignment was used as input data for calculating the phylogenetic tree. Although there is little overall sequence conservation (see example 3), regions of high conservation can be discriminated, such as the motifs of SEQ ID NO: 141 to 145, but additional motifs may be derived from the alignment.

### Example 3

### Calculation of Global Percentage Identity Between Polypeptide Sequences Useful in Performing the Methods of the Invention

[0672] Global percentages of similarity and identity between full length polypeptide sequences useful in performing the methods of the invention were determined using one of the methods available in the art, the MatGAT (Matrix Global Alignment Tool) software (BMC Bioinformatics. 2003 4:29. MatGAT: an application that generates similarity/identity matrices using protein or DNA sequences. Campanella J J, Bitincka L, Smalley J; software hosted by Ledion Bitincka). MatGAT software generates similarity/identity matrices for DNA or protein sequences without needing pre-alignment of the data. The program performs a series of pair-wise alignments using the Myers and Miller global alignment algorithm (with a gap opening penalty of 12, and a gap extension penalty of 2), calculates similarity and identity using for example Blosum 62 (for polypeptides), and then places the results in a distance matrix. Sequence similarity is shown in the bottom half of the dividing line and sequence identity is shown in the top half of the diagonal dividing line.

[0673] Parameters used in the comparison were:
[0674] Scoring matrix: Blosum62
[0675] First Gap: 12
[0676] Extending gap: 2

[0677] Results of the software analysis are shown in Table A1 for the global similarity and identity over the full length of the polypeptide sequences (excluding the partial polypeptide sequences). Percentage identity is given above the diagonal in bold and percentage similarity is given below the diagonal (normal face).

[0678] The percentage identity between the polypeptide sequences useful in performing the methods of the invention can be as low as 9% amino acid identity compared to SEQ ID NO: 2.

TABLE A1
MatGAT results for global similarity and identity over the full length of the
polypeptide sequences.

| | | 1 | 2 | 3 | 4 | 5 | 6 | 7 | 8 | 9 | 10 | 11 | 12 | 13 |
|---|---|---|---|---|---|---|---|---|---|---|---|---|---|---|
| 1. | SEQID2 | | 42.4 | 17.2 | 16.3 | 16.9 | 17.4 | 18.8 | 21.6 | 12.5 | 11.9 | 11.3 | 19.4 | 13 |
| 2. | SEQID4 | 57.8 | | 16.4 | 15.3 | 15.1 | 14.9 | 16.4 | 21.5 | 12.1 | 11 | 11.3 | 18.8 | 11.9 |
| 3. | SEQID6 | 25.5 | 25.4 | | 44.2 | 47.4 | 43.8 | 69.8 | 25.3 | 17.5 | 14.4 | 14.3 | 25.9 | 21.3 |
| 4. | SEQID8 | 25.7 | 24.5 | 57.6 | | 44.9 | 46.6 | 47.6 | 25.9 | 18.8 | 18.8 | 19.2 | 27.5 | 19.7 |
| 5. | SEQID10 | 25 | 24.7 | 61.1 | 61.8 | | 58.8 | 47.5 | 27 | 17 | 18.6 | 19.1 | 26.3 | 19.2 |
| 6. | SEQID12 | 25.5 | 24.5 | 57.6 | 60.9 | 73.2 | | 44.8 | 26.2 | 15.8 | 16.7 | 17.6 | 26.8 | 19.8 |
| 7. | SEQID14 | 26.3 | 24.7 | 78.5 | 57 | 59.6 | 56.6 | | 26.9 | 15.2 | 16.6 | 14.6 | 26.5 | 20.6 |
| 8. | SEQID16 | 32.6 | 31.3 | 41.6 | 42.5 | 42.5 | 44.8 | 43.1 | | 16.8 | 17 | 15.2 | 88.1 | 15.5 |
| 9. | SEQID18 | 22.2 | 20.5 | 29.4 | 30.9 | 35.9 | 29.1 | 29.8 | 29.5 | | 39 | 55.9 | 16.1 | 25.9 |
| 10. | SEQID20 | 19.4 | 18 | 29 | 30.9 | 36.2 | 32.5 | 31.2 | 27.7 | 51.2 | | 40.6 | 17.7 | 24.9 |
| 11. | SEQID22 | 20.1 | 19.1 | 33.1 | 33.3 | 34.1 | 33.1 | 34.4 | 31.5 | 69.8 | 54 | | 15.2 | 28 |
| 12. | SEQID24 | 30.8 | 28.7 | 43.5 | 44 | 41.7 | 42.6 | 42.6 | 92.2 | 29.8 | 30.7 | 31.8 | | 18.2 |
| 13. | SEQID26 | 20.1 | 20.5 | 38.2 | 32.1 | 36.6 | 35.8 | 36.9 | 31.8 | 41.8 | 41.1 | 42.5 | 32.7 | |
| 14. | SEQID28 | 16.4 | 17.8 | 29.7 | 27 | 30 | 27.8 | 33 | 23.7 | 35.8 | 37.2 | 37.4 | 23.5 | 40.4 |
| 15. | SEQID30 | 25.2 | 22.2 | 30.5 | 35.1 | 27.6 | 29.7 | 26.6 | 29.2 | 44.7 | 42.1 | 42.1 | 30.2 | 32.8 |
| 16. | SEQID32 | 15.6 | 16.3 | 29.4 | 24.8 | 26.5 | 27.8 | 28 | 27.5 | 37.5 | 33 | 38.1 | 28 | 54.7 |
| 17. | SEQID34 | 28.5 | 28.4 | 46.1 | 42.4 | 46.7 | 43 | 46.3 | 51.7 | 30 | 30 | 28.9 | 49.1 | 29.3 |
| 18. | SEQID36 | 23.2 | 23.6 | 33.7 | 34 | 33.2 | 35.3 | 34 | 38.4 | 43.6 | 45.2 | 41.6 | 33.2 | 32.6 |
| 19. | SEQID38 | 18.8 | 17.1 | 27.3 | 30.3 | 27.5 | 34.1 | 35.1 | 27.7 | 44.2 | 47.9 | 48.3 | 26.8 | 36.2 |
| 20. | SEQID40 | 23.2 | 21.4 | 30.9 | 35.8 | 32.5 | 37.2 | 29.3 | 28.9 | 43.8 | 45.7 | 44.5 | 36 | 39.4 |
| 21. | SEQID42 | 28.9 | 25.7 | 52.3 | 50.9 | 52.6 | 52.6 | 51.3 | 41.3 | 28.8 | 30.1 | 28.4 | 40.5 | 28.4 |
| 22. | SEQID44 | 22.5 | 23.3 | 33.3 | 30.6 | 31.1 | 32.5 | 32.2 | 33.6 | 42.9 | 44.3 | 41 | 32 | 34.7 |
| 23. | SEQID46 | 20.9 | 20.9 | 35.5 | 37.3 | 39 | 36.5 | 30.6 | 30.3 | 46.5 | 46.8 | 47.1 | 30.7 | 36.8 |
| 24. | SEQID48 | 20.9 | 19.5 | 24.6 | 27.3 | 25.6 | 23.8 | 27.9 | 27.7 | 42.5 | 49.2 | 43.5 | 26.5 | 37.2 |
| 25. | SEQID50 | 20.2 | 20 | 28 | 28.5 | 31.4 | 29.1 | 34 | 30.9 | 38.6 | 31.9 | 29.7 | 29.8 | 38.3 |
| 26. | SEQID52 | 22.9 | 22 | 45.4 | 41.2 | 42.5 | 46 | 46.1 | 38.2 | 29.8 | 29.5 | 29.4 | 37.2 | 34.1 |
| 27. | SEQID54 | 20.2 | 19.1 | 30 | 29.7 | 30.3 | 29.8 | 31.4 | 30.9 | 47.4 | 53 | 51.2 | 29.5 | 40.8 |
| 28. | SEQID56 | 21.4 | 18.4 | 27 | 28.8 | 30.3 | 28.5 | 28.7 | 26 | 45.3 | 48.5 | 48.5 | 28.9 | 37.3 |
| 29. | SEQID58 | 21.9 | 20.5 | 26.5 | 28.5 | 30.2 | 26.2 | 25.5 | 25.7 | 38 | 38.9 | 37.4 | 31.3 | 35.5 |
| 30. | SEQID60 | 24.3 | 22.5 | 27.7 | 27.9 | 25.6 | 29.7 | 25.6 | 30.7 | 32.7 | 29.4 | 33.5 | 31.7 | 32.7 |
| 31. | SEQID62 | 20.7 | 20.8 | 29.5 | 30 | 26.5 | 27.2 | 25.8 | 30.1 | 36.2 | 32.6 | 35.6 | 30.1 | 36.9 |
| 32. | SEQID64 | 22.7 | 21.4 | 29.6 | 29.6 | 28.5 | 28.5 | 29.8 | 33.4 | 29.3 | 28.5 | 32.3 | 30.9 | 32.9 |
| 33. | SEQID66 | 13.7 | 14 | 30.4 | 29.1 | 31.4 | 33.8 | 31.6 | 22 | 21.8 | 30.7 | 28.3 | 23.5 | 22.6 |
| 34. | SEQID68 | 24.2 | 24 | 30.3 | 32.1 | 29.2 | 31.9 | 32.1 | 31.3 | 38.4 | 39.7 | 36 | 32.4 | 32.6 |
| 35. | SEQID70 | 25.2 | 23.4 | 33.6 | 37.2 | 32.7 | 37.5 | 33 | 34.1 | 42.2 | 37.8 | 41.9 | 35.4 | 34.5 |
| 36. | SEQID72 | 52.3 | 54.2 | 22.5 | 24.2 | 21.1 | 23.1 | 23.5 | 27.1 | 18.2 | 17.9 | 17.2 | 25.9 | 18.5 |
| 37. | SEQID74 | 21.2 | 21.4 | 40.6 | 36.7 | 30.8 | 38.7 | 38.1 | 33.8 | 46.5 | 48.1 | 47.2 | 37.8 | 34 |
| 38. | SEQID76 | 21.7 | 18.1 | 37.5 | 34.2 | 38.3 | 36.1 | 37.2 | 28 | 43.9 | 45.7 | 47.5 | 33.6 | 41.5 |
| 39. | SEQID78 | 36.8 | 34.4 | 30.8 | 32 | 31.8 | 33 | 31 | 40.1 | 24.4 | 23 | 22.6 | 38.3 | 22.2 |
| 40. | SEQID80 | 39.6 | 36.3 | 32.8 | 34.3 | 29.6 | 31.7 | 32.2 | 41.5 | 25.7 | 24.6 | 21.8 | 40 | 24.2 |
| 41. | SEQID82 | 37.5 | 34.4 | 35.3 | 37.3 | 34.4 | 35.7 | 35 | 43.9 | 27.7 | 26.6 | 24.8 | 42.6 | 29.5 |
| 42. | SEQID84 | 52.6 | 50.1 | 28.7 | 29.4 | 27.3 | 28.3 | 27.2 | 35.2 | 21.2 | 21.3 | 22.1 | 33 | 24.2 |
| 43. | SEQID86 | 52 | 53.3 | 27.4 | 26.7 | 25.6 | 27.2 | 27.2 | 33.9 | 20.5 | 20 | 20.1 | 30.6 | 20.1 |
| 44. | SEQID88 | 54 | 58.9 | 22.3 | 22.1 | 19.5 | 20.2 | 20.2 | 25.3 | 16.8 | 17.4 | 18.5 | 25.4 | 18.4 |
| 45. | SEQID90 | 53.1 | 61 | 23.4 | 22.7 | 21.3 | 22.4 | 21.3 | 27.7 | 18.4 | 16.9 | 16.2 | 26.4 | 18.7 |
| 46. | SEQID94 | 52.4 | 58.1 | 22.6 | 23.3 | 20.4 | 22.1 | 20.3 | 27.2 | 18.1 | 18.4 | 16.9 | 25.4 | 16.6 |
| 47. | SEQID96 | 50.7 | 55.1 | 21.8 | 22.7 | 21.3 | 22.4 | 20.7 | 26 | 19.2 | 16.7 | 17.3 | 24.9 | 16.9 |
| 48. | SEQID100 | 50 | 47.9 | 33.6 | 34.9 | 32.4 | 31.3 | 32.9 | 40.5 | 26.6 | 25 | 24.1 | 38.3 | 27 |
| 49. | SEQID102 | 30.3 | 30.4 | 44.7 | 44.8 | 46.3 | 41.4 | 48.6 | 43.6 | 29.8 | 36.1 | 31.8 | 42.6 | 30.3 |
| 50. | SEQID104 | 48.5 | 47.1 | 31.4 | 31.6 | 31.8 | 33.6 | 34.3 | 41.3 | 26 | 23.9 | 21.7 | 39.3 | 25.5 |
| 51. | SEQID106 | 35.7 | 33.6 | 36.5 | 38.5 | 35.1 | 36.2 | 33.7 | 46.6 | 26.4 | 24.1 | 24.1 | 45.2 | 27.5 |
| 52. | SEQID108 | 36.5 | 35.7 | 32.3 | 34.7 | 31.2 | 32.7 | 34.1 | 43.4 | 25.4 | 26.9 | 26.3 | 42.3 | 25.2 |
| 53. | SEQID110 | 28.3 | 25.4 | 44.7 | 42.7 | 44.9 | 42.1 | 46 | 49.4 | 38.3 | 37.3 | 32.1 | 47.3 | 39 |
| 54. | SEQID124 | 27.6 | 25.6 | 61.6 | 72.7 | 60.7 | 61.9 | 58.5 | 47.4 | 30.3 | 28.5 | 32.8 | 46.1 | 33.4 |
| 55. | SEQID126 | 26.8 | 25.1 | 64.5 | 62.1 | 66.2 | 63.9 | 65.7 | 43.4 | 32.2 | 32.5 | 31.8 | 42.3 | 31.4 |
| 56. | SEQID134 | 27.1 | 28.2 | 55.9 | 68.6 | 63.1 | 63.7 | 59.8 | 46.2 | 32 | 27.2 | 34.7 | 45.2 | 33.5 |
| 57. | SEQID140 | 24.8 | 23.3 | 70.6 | 55.2 | 58.2 | 57 | 78 | 40.8 | 34 | 29.3 | 37.6 | 40.8 | 39 |
| | | 14 | 15 | 16 | 17 | 18 | 19 | 20 | 21 | 22 | 23 | 24 | 25 | 26 |
| 1. | SEQID2 | 10 | 14.1 | 9 | 20.2 | 12.2 | 12.5 | 12.5 | 19.9 | 13.3 | 13.7 | 13.5 | 12 | 16.6 |
| 2. | SEQID4 | 9.9 | 11.7 | 10.5 | 21 | 13.3 | 10.5 | 13 | 18.1 | 12.7 | 12.4 | 10.2 | 11.9 | 14.9 |
| 3. | SEQID6 | 14.7 | 16.5 | 15 | 27.1 | 19.8 | 14 | 16.7 | 35.3 | 18.3 | 16.2 | 11.6 | 17.5 | 29 |
| 4. | SEQID8 | 15.1 | 22 | 15.4 | 25.5 | 20 | 19.1 | 17.2 | 34.3 | 18.9 | 20.5 | 13.3 | 15 | 28.1 |
| 5. | SEQID10 | 15.3 | 17.2 | 12.9 | 28.9 | 18.9 | 14.6 | 18.3 | 32.6 | 20.1 | 18.8 | 13.5 | 14.7 | 27.9 |
| 6. | SEQID12 | 13.7 | 17 | 13.5 | 27.3 | 19 | 17.9 | 19 | 34.6 | 19.3 | 18.6 | 11.4 | 14.5 | 29 |
| 7. | SEQID14 | 18.5 | 17.6 | 14.1 | 29.2 | 19.7 | 19.9 | 15.9 | 34.4 | 19.3 | 15.8 | 13.3 | 14.9 | 31.4 |
| 8. | SEQID16 | 12.7 | 14.2 | 14.4 | 35.1 | 18.7 | 17.7 | 15.3 | 22.7 | 16 | 14.8 | 13.9 | 15.9 | 23.4 |
| 9. | SEQID18 | 23.6 | 30.8 | 26 | 12.7 | 33.3 | 30.9 | 29.5 | 14.1 | 31.7 | 31.1 | 26.8 | 19.3 | 19.1 |
| 10. | SEQID20 | 23 | 34.2 | 23 | 15.9 | 32.6 | 36.1 | 31.1 | 14 | 32.2 | 34.1 | 34.5 | 16.4 | 16.5 |
| 11. | SEQID22 | 20.7 | 28.9 | 28 | 13.4 | 31.6 | 30.4 | 27.6 | 14.1 | 29.9 | 30 | 28.4 | 13.9 | 12.4 |
| 12. | SEQID24 | 13.6 | 14.4 | 13.4 | 33.3 | 18.9 | 16.8 | 17.4 | 22.2 | 15.7 | 14.3 | 13.6 | 14.7 | 23.1 |
| 13. | SEQID26 | 28.4 | 20.7 | 48.8 | 12 | 19.9 | 23.9 | 25.9 | 14.8 | 23.5 | 23.7 | 23.6 | 20.5 | 18.8 |
| 14. | SEQID28 | | 14.5 | 38 | 17.4 | 16.2 | 24.8 | 17.1 | 15.9 | 15.1 | 22 | 22.1 | 20.7 | 16 |
| 15. | SEQID30 | 24.5 | | 19.1 | 13.1 | 41.4 | 27.6 | 29.1 | 16.7 | 46.6 | 33.8 | 35.8 | 15.9 | 15.4 |
| 16. | SEQID32 | 56.8 | 27.9 | | 15.2 | 19 | 23.3 | 21.8 | 12.3 | 19.3 | 22.3 | 23.5 | 23.2 | 14.1 |
| 17. | SEQID34 | 33.4 | 26.6 | 25.8 | | 17.3 | 15.3 | 14.8 | 26.7 | 15.6 | 16.3 | 12.4 | 16.2 | 26 |
| 18. | SEQID36 | 26 | 57.4 | 27.1 | 31.8 | | 29.3 | 32 | 19.2 | 44.4 | 32 | 28.6 | 13.2 | 15.1 |
| 19. | SEQID38 | 39.9 | 37.7 | 32.6 | 29.3 | 37.5 | | 32.6 | 11.4 | 29.6 | 38.9 | 37 | 19 | 12.6 |
| 20. | SEQID40 | 29.7 | 42.9 | 31.2 | 26.8 | 46 | 44.8 | | 15.7 | 32.7 | 32.1 | 26.4 | 13 | 16.1 |
| 21. | SEQID42 | 28.4 | 28.9 | 24.5 | 44.4 | 33.7 | 28.1 | 31.2 | | 17.3 | 16.2 | 12.5 | 15.6 | 39.9 |
| 22. | SEQID44 | 24.9 | 59.7 | 24.9 | 27.9 | 60.1 | 41.3 | 47 | 31.7 | | 31.1 | 32.4 | 15.2 | 16.9 |
| 23. | SEQID46 | 32.9 | 49.9 | 31.3 | 29 | 47.7 | 50 | 47.3 | 32.6 | 47.5 | | 46.3 | 19.1 | 17.5 |
| 24. | SEQID48 | 32.6 | 45.7 | 30.9 | 30.2 | 45.5 | 49.8 | 46.1 | 23.2 | 47.3 | 58.7 | | 17.8 | 14.4 |
| 25. | SEQID50 | 33 | 26.4 | 34.4 | 32.1 | 24.9 | 35.9 | 24.3 | 30.1 | 24.6 | 37.4 | 33.9 | | 18.4 |
| 26. | SEQID52 | 31.7 | 24.3 | 25.6 | 42.2 | 26.8 | 26.8 | 27.4 | 52.3 | 27 | 30 | 26.2 | 30.1 | |
| 27. | SEQID54 | 34.5 | 44.7 | 35.5 | 30.7 | 43.3 | 49.8 | 46.7 | 30.4 | 42.3 | 72.3 | 58.8 | 35.5 | 25.8 |
| 28. | SEQID56 | 36.3 | 44.2 | 35.9 | 31.7 | 40.8 | 48.5 | 45.1 | 24.5 | 41.5 | 54.2 | 64.5 | 39.5 | 28.9 |
| 29. | SEQID58 | 32.1 | 35.1 | 32.1 | 29.3 | 25.5 | 33 | 42.7 | 24.9 | 29 | 41.1 | 38.9 | 34 | 24.6 |
| 30. | SEQID60 | 26.6 | 34.8 | 27.4 | 29.7 | 35 | 28.2 | 29.9 | 27.4 | 36.8 | 31.2 | 34.3 | 27.4 | 26.1 |
| 31. | SEQID62 | 26.5 | 31 | 31.2 | 28.9 | 34.8 | 34.9 | 36.3 | 29.1 | 29.5 | 38.4 | 37.9 | 32.6 | 26.8 |
| 32. | SEQID64 | 24.6 | 32.3 | 26.5 | 28.2 | 29.3 | 29.3 | 35.6 | 26.5 | 32 | 35.4 | 31.8 | 27.9 | 24 |
| 33. | SEQID66 | 26.2 | 19.6 | 27.5 | 24 | 20 | 33 | 22.1 | 29.4 | 20.8 | 19.4 | 23.9 | 23.6 | 25.2 |
| 34. | SEQID68 | 23.5 | 50.1 | 23.2 | 29.2 | 53.3 | 35 | 47 | 31.9 | 50.4 | 43.1 | 39.9 | 25.1 | 26.4 |
| 35. | SEQID70 | 27.1 | 41.1 | 27.7 | 33 | 43.8 | 43.4 | 44.5 | 36.9 | 43.7 | 50.1 | 41.3 | 26.5 | 30.7 |
| 36. | SEQID72 | 15.4 | 23.1 | 12.9 | 25.2 | 23.2 | 16.4 | 19.2 | 22.8 | 21.6 | 20.3 | 19.1 | 18.4 | 19.5 |
| 37. | SEQID74 | 29.9 | 56.6 | 30.5 | 32.7 | 65.2 | 43.7 | 48.7 | 32.4 | 57.1 | 53.8 | 51.3 | 29.9 | 29.9 |
| 38. | SEQID76 | 38.9 | 39.3 | 35.8 | 29.3 | 38.4 | 43 | 43.2 | 31.7 | 38.5 | 43.2 | 45.2 | 35.9 | 38.1 |
| 39. | SEQID78 | 17.9 | 28.7 | 16.7 | 38.5 | 33.4 | 20 | 26.5 | 31.2 | 27.9 | 24 | 22.6 | 25.3 | 26.9 |
| 40. | SEQID80 | 23.1 | 27.6 | 19.9 | 40.4 | 31.1 | 22.9 | 24.2 | 33.7 | 28.5 | 25.9 | 24.2 | 24 | 26.6 |
| 41. | SEQID82 | 20.6 | 27.9 | 21.7 | 40.1 | 33.3 | 23.5 | 27.9 | 36.6 | 27.7 | 28.2 | 25.1 | 29.5 | 30.4 |
| 42. | SEQID84 | 18.7 | 27.3 | 16.7 | 31.8 | 27.2 | 17.8 | 24.2 | 30.1 | 28.3 | 23 | 20.6 | 22.8 | 25.1 |
| 43. | SEQID86 | 17 | 23.9 | 15.7 | 31.2 | 23.6 | 17.9 | 22.2 | 27.7 | 23.6 | 22.9 | 20 | 22.2 | 23.6 |
| 44. | SEQID88 | 14.5 | 22 | 13 | 22.9 | 22.5 | 15.2 | 19.4 | 22.1 | 20.2 | 17.1 | 17.1 | 17.3 | 18.6 |
| 45. | SEQID90 | 16.3 | 23.1 | 14.2 | 23.9 | 21.3 | 15.5 | 18.9 | 23.4 | 21.2 | 20.7 | 19.2 | 17.4 | 19.4 |
| 46. | SEQID94 | 13.9 | 22.9 | 14.6 | 22.6 | 21 | 16.5 | 18.9 | 24.5 | 19.8 | 18.7 | 18.9 | 17.1 | 19.4 |
| 47. | SEQID96 | 14.2 | 22.6 | 13 | 23.8 | 22.6 | 15.7 | 16.4 | 23.6 | 20.7 | 19.7 | 19.2 | 15.6 | 18.8 |
| 48. | SEQID100 | 19.8 | 28.4 | 20.7 | 38.1 | 27.9 | 21.4 | 25 | 35.4 | 27.3 | 26.1 | 23.6 | 26.8 | 29.7 |
| 49. | SEQID102 | 29.3 | 30.5 | 26.4 | 53.7 | 27.9 | 29.6 | 29.3 | 43.8 | 29.2 | 31.6 | 33.6 | 29.3 | 44.3 |
| 50. | SEQID104 | 21.4 | 28.2 | 19.9 | 37 | 29.6 | 22.1 | 27.1 | 34.5 | 29.6 | 26.4 | 24.2 | 24.6 | 29.3 |
| 51. | SEQID106 | 23.4 | 31.2 | 21.3 | 43.6 | 36 | 24.1 | 25.5 | 34.4 | 26.4 | 24.5 | 25 | 22.7 | 27.5 |
| 52. | SEQID108 | 21.4 | 29.8 | 20.7 | 40.5 | 29.8 | 21.6 | 26.5 | 34.7 | 25.8 | 23.4 | 23.6 | 25.6 | 27.8 |
| 53. | SEQID110 | 27.5 | 30.7 | 27.2 | 56.8 | 33.2 | 33.8 | 32.2 | 36.6 | 33.3 | 38.1 | 32.6 | 27.9 | 38 |
| 54. | SEQID124 | 26.3 | 29.2 | 25.1 | 44.6 | 34.5 | 30.7 | 37.2 | 52.3 | 31.1 | 38.1 | 23.5 | 29.4 | 42.4 |
| 55. | SEQID126 | 28.3 | 30.2 | 26.6 | 46.3 | 33.2 | 30.1 | 30.6 | 52 | 28.7 | 36.1 | 25.9 | 30.8 | 46.9 |
| 56. | SEQID134 | 24.8 | 32.8 | 23.6 | 42.9 | 35.3 | 29.6 | 36.6 | 49.5 | 32.5 | 37.5 | 24.2 | 29.9 | 40.5 |
| 57. | SEQID140 | 28.6 | 28.7 | 28.2 | 46.7 | 33.7 | 30.8 | 29.7 | 50 | 29 | 27.1 | 30.9 | 29.3 | 53.8 |
| | | 27 | 28 | 29 | 30 | 31 | 32 | 33 | 34 | 35 | 36 | 37 | 38 | 39 |
| 1. | SEQID2 | 13.3 | 12.3 | 13.2 | 12.6 | 12.3 | 13.1 | 8.6 | 13.3 | 13.8 | 36.1 | 13.3 | 12.7 | 25.6 |
| 2. | SEQID4 | 11.6 | 11.5 | 11.9 | 13.2 | 12.1 | 12.4 | 9 | 13.9 | 13.2 | 39.1 | 12.6 | 10.9 | 21.4 |
| 3. | SEQID6 | 13.4 | 13.2 | 15.1 | 14.7 | 13.2 | 14.2 | 19 | 17.7 | 17.5 | 15.7 | 23.1 | 19.1 | 21.4 |
| 4. | SEQID8 | 16.6 | 15.9 | 13.9 | 13 | 14.2 | 14.7 | 23.1 | 18.4 | 20.6 | 15.6 | 20.6 | 20.6 | 22 |
| 5. | SEQID10 | 12.5 | 12.9 | 15.4 | 13.9 | 13.2 | 13.8 | 19.4 | 16.7 | 19.4 | 14.8 | 16.7 | 21 | 20.2 |
| 6. | SEQID12 | 13.5 | 13.3 | 11.3 | 14.7 | 14.2 | 11.8 | 21.8 | 19 | 20.6 | 14.5 | 22.7 | 18.4 | 22.6 |
| 7. | SEQID14 | 17.5 | 14 | 14 | 14 | 14.6 | 13.7 | 21.2 | 17.8 | 19.6 | 15.4 | 21.1 | 18.5 | 20.5 |
| 8. | SEQID16 | 15.1 | 13 | 13.4 | 14.7 | 14.2 | 14.1 | 11 | 17.1 | 17.7 | 19.9 | 18.9 | 18.8 | 28.7 |
| 9. | SEQID18 | 29.6 | 26.1 | 19.5 | 20.3 | 20.5 | 18.1 | 12.6 | 25.9 | 28.1 | 11.8 | 32.4 | 29.1 | 14.9 |
| 10. | SEQID20 | 36.8 | 32.8 | 22 | 19.5 | 19.9 | 18.3 | 18.6 | 27.4 | 25.7 | 12.4 | 35.3 | 32.6 | 13.4 |
| 11. | SEQID22 | 34 | 29.1 | 19.6 | 18.6 | 17.5 | 17.2 | 14.7 | 26.8 | 29.9 | 9.9 | 34 | 30.2 | 12.8 |
| 12. | SEQID24 | 12.9 | 14.8 | 13.2 | 16.2 | 13.2 | 13.5 | 14.3 | 18.3 | 17.4 | 18.9 | 20.3 | 18.6 | 28.3 |
| 13. | SEQID26 | 24.5 | 24.8 | 20.2 | 21 | 18.2 | 18.2 | 13.9 | 22.6 | 23.3 | 10.6 | 22.9 | 23.5 | 13.5 |
| 14. | SEQID28 | 21.8 | 22.7 | 22 | 17.8 | 13.9 | 14 | 14.6 | 13 | 19.1 | 8.6 | 18.5 | 22.5 | 10.2 |
| 15. | SEQID30 | 32.8 | 32.8 | 21.6 | 19.4 | 16.6 | 18.4 | 11.6 | 34.1 | 30.5 | 13.2 | 44.6 | 27.6 | 17 |
| 16. | SEQID32 | 24.4 | 23.9 | 19.6 | 18.5 | 18.5 | 17.1 | 13 | 19 | 19.9 | 8.9 | 20.4 | 22.5 | 11.2 |
| 17. | SEQID34 | 16.3 | 15.6 | 15.8 | 15.7 | 12.4 | 12.2 | 14.3 | 15.8 | 17.5 | 17.8 | 14.5 | 13.4 | 27.6 |
| 18. | SEQID36 | 28.4 | 26.5 | 12.8 | 17.9 | 17.9 | 15.1 | 12 | 37.4 | 30.4 | 13.1 | 55.2 | 26.9 | 18.4 |
| 19. | SEQID38 | 39.9 | 36.2 | 18.7 | 16.2 | 20.3 | 16.3 | 18.9 | 25.7 | 30.9 | 9.8 | 33.1 | 32.1 | 12.6 |
| 20. | SEQID40 | 28.9 | 28 | 21 | 18.4 | 18.1 | 18.8 | 12.6 | 32.9 | 31.7 | 11.8 | 33.3 | 29.3 | 15 |
| 21. | SEQID42 | 14.5 | 13.1 | 11.7 | 13.4 | 12.1 | 12.9 | 19.8 | 20 | 19.3 | 16.8 | 15.4 | 15.8 | 20.1 |
| 22. | SEQID44 | 29.9 | 29.6 | 17.2 | 20.4 | 17.4 | 16.3 | 12.6 | 36.1 | 30.9 | 13.2 | 45 | 28.7 | 15 |
| 23. | SEQID46 | 58.7 | 40.4 | 23.4 | 18.5 | 20.6 | 17.4 | 11.9 | 29.4 | 33.2 | 12.4 | 32.8 | 30.3 | 16 |
| 24. | SEQID48 | 46.4 | 52.4 | 23.5 | 18.8 | 19.9 | 17.6 | 14.6 | 26.9 | 28.7 | 11.4 | 31.5 | 28.7 | 14.6 |
| 25. | SEQID50 | 16.8 | 20.9 | 18.8 | 18.2 | 18.5 | 16.5 | 12.7 | 14.5 | 16.7 | 11.5 | 14.2 | 16.4 | 16.8 |
| 26. | SEQID52 | 11.8 | 15.6 | 14.2 | 13.1 | 13.8 | 13.6 | 15.7 | 15.9 | 19.8 | 14.3 | 17.3 | 17.4 | 20.6 |
| 27. | SEQID54 | | 41.5 | 19.9 | 20.8 | 20.8 | 16.7 | 13.9 | 26.9 | 28.8 | 10.8 | 31.1 | 32.7 | 14.2 |
| 28. | SEQID56 | 57.1 | | 21.6 | 18.8 | 19.9 | 19.1 | 16.7 | 24.3 | 27.2 | 11.3 | 30.5 | 31.8 | 15.4 |
| 29. | SEQID58 | 35.5 | 34.6 | | 24.9 | 27.1 | 24.3 | 13.1 | 16.7 | 17.8 | 11.4 | 19.7 | 19.8 | 16.3 |
| 30. | SEQID60 | 34.3 | 32.7 | 35.5 | | 37.1 | 38.9 | 12.2 | 18.5 | 21.9 | 12 | 19.3 | 20.2 | 15.4 |
| 31. | SEQID62 | 37.2 | 34.9 | 40.5 | 48.5 | | 72.8 | 13.1 | 19.2 | 20.8 | 11.3 | 18.2 | 17.6 | 15.4 |
| 32. | SEQID64 | 34 | 33.7 | 37.3 | 54.8 | 75.7 | | 12.1 | 19.6 | 18.3 | 12.1 | 17.9 | 16.3 | 16.6 |
| 33. | SEQID66 | 22.6 | 28.9 | 20.9 | 20.6 | 23.8 | 21.3 | | 12 | 13.2 | 7.4 | 13.5 | 15.6 | 11 |
| 34. | SEQID68 | 39.2 | 33.9 | 27.4 | 33.5 | 30 | 36.6 | 19.6 | | 26.8 | 13.4 | 37.7 | 25.7 | 15.8 |
| 35. | SEQID70 | 45.4 | 38.6 | 35.1 | 35.8 | 34.2 | 34.8 | 22.1 | 38.4 | | 14.4 | 29.7 | 33 | 16.8 |
| 36. | SEQID72 | 19.1 | 17.9 | 19.7 | 21.8 | 18.8 | 22.9 | 12 | 20.6 | 22.5 | | 12.2 | 11 | 21.5 |
| 37. | SEQID74 | 47.8 | 45.3 | 35.8 | 33.5 | 34 | 32.6 | 22.3 | 51.2 | 44.5 | 20.9 | | 30.5 | 16 |
| 38. | SEQID76 | 47.7 | 47.4 | 34 | 29.9 | 31.2 | 28.2 | 24.9 | 36.8 | 44.2 | 17.4 | 43.1 | | 14.5 |
| 39. | SEQID78 | 24 | 23 | 25.3 | 27.9 | 22.6 | 26.3 | 16.5 | 25.3 | 25.5 | 34.4 | 28.9 | 23.8 | |
| 40. | SEQID80 | 23.3 | 24.8 | 26.3 | 30.5 | 26.6 | 29.8 | 17.7 | 32.2 | 25.5 | 32.7 | 27.4 | 22.2 | 59.9 |
| 41. | SEQID82 | 27.1 | 24.4 | 28.8 | 28.8 | 25.9 | 32.6 | 20.8 | 33 | 27.3 | 32 | 30.8 | 23.3 | 46.4 |
| 42. | SEQID84 | 22.3 | 21.3 | 23.4 | 27.3 | 21.7 | 21.9 | 15 | 26.8 | 25.3 | 45.3 | 21.2 | 21.9 | 39.7 |
| 43. | SEQID86 | 20.3 | 20.8 | 22 | 25.5 | 20.8 | 22.4 | 15 | 27.2 | 23.8 | 48.7 | 21.7 | 20.3 | 39.8 |
| 44. | SEQID88 | 17.6 | 16.4 | 19.1 | 21.7 | 17.6 | 20.3 | 11.1 | 21.2 | 19.9 | 53.9 | 18.8 | 16.8 | 32.2 |
| 45. | SEQID90 | 18.4 | 18 | 19.6 | 22.3 | 17.2 | 21 | 12.7 | 21.7 | 20.2 | 56 | 18.5 | 18.5 | 34.4 |
| 46. | SEQID94 | 17.3 | 18.5 | 18.1 | 20.7 | 17.2 | 19.8 | 11.6 | 22.3 | 21.2 | 52.6 | 19.5 | 17.1 | 32.1 |
| 47. | SEQID96 | 16.9 | 16.4 | 19.3 | 20.5 | 18.2 | 20.3 | 12.1 | 22.8 | 21.7 | 54.5 | 20.2 | 17.7 | 31.4 |
| 48. | SEQID100 | 27 | 27.3 | 24.8 | 27.3 | 24.3 | 26.4 | 18.7 | 29.3 | 27.3 | 43.1 | 27.7 | 23.6 | 39.3 |
| 49. | SEQID102 | 31.7 | 27.1 | 27.7 | 26.6 | 27.5 | 24 | 26.4 | 26.9 | 31.3 | 32.4 | 27.7 | 32.1 | 32.8 |
| 50. | SEQID104 | 25.3 | 27.3 | 27.3 | 29.8 | 24.6 | 27.5 | 17.4 | 28.2 | 25.1 | 43.3 | 29.1 | 26.2 | 41.3 |
| 51. | SEQID106 | 25 | 25.5 | 25.9 | 26.1 | 23.4 | 28 | 17.9 | 34.2 | 25 | 31.7 | 32.6 | 25.7 | 46.6 |
| 52. | SEQID108 | 22.7 | 23.8 | 24.5 | 27.2 | 25.6 | 27.6 | 18 | 28.7 | 28.1 | 31.8 | 27.4 | 25.2 | 66.6 |
| 53. | SEQID110 | 31.7 | 33.8 | 27.7 | 26.6 | 27.9 | 28.7 | 22.6 | 31.1 | 32.4 | 23.8 | 38.1 | 36.2 | 36 |
| 54. | SEQID124 | 31.6 | 27.6 | 25.1 | 26.6 | 24.8 | 30.1 | 28.5 | 32.1 | 36 | 23.5 | 39.3 | 35.3 | 31.4 |
| 55. | SEQID126 | 31.4 | 31.8 | 29.3 | 26.9 | 30.2 | 29.3 | 36 | 32.9 | 32.4 | 23.6 | 37.4 | 29.7 | 31.8 |
| 56. | SEQID134 | 27.8 | 25.4 | 27.5 | 25.9 | 32.9 | 27.6 | 32.6 | 30.5 | 36.3 | 25.2 | 37.2 | 35 | 35 |
| 57. | SEQID140 | 33.4 | 30.4 | 26.5 | 24.4 | 27.9 | 27.9 | 32.7 | 30.3 | 32.7 | 22.7 | 33.3 | 36.1 | 31.4 |
| | | 40 | 41 | 42 | 43 | 44 | 45 | 46 | 47 | 48 | 49 | 50 | 51 | 52 |
| 1. | SEQID2 | 25.3 | 22.4 | 39.5 | 38.3 | 41.7 | 41.1 | 39.7 | 37.9 | 38.3 | 22.4 | 36.5 | 23.8 | 23.8 |
| 2. | SEQID4 | 23.7 | 23.1 | 38.8 | 39.6 | 46.7 | 46.9 | 45.1 | 43.1 | 37.5 | 21.2 | 37.8 | 22.2 | 23.5 |
| 3. | SEQID6 | 22.7 | 22.3 | 17.9 | 17.9 | 14.3 | 15.1 | 15.6 | 14.5 | 22.4 | 29 | 20.3 | 25.2 | 22.3 |
| 4. | SEQID8 | 22.5 | 25 | 19.4 | 18 | 15.3 | 15.4 | 15.4 | 15.2 | 23.5 | 25.1 | 21 | 24.7 | 22 |
| 5. | SEQID10 | 21.9 | 21.9 | 18.7 | 15.5 | 13 | 12.9 | 13.4 | 13.3 | 20.4 | 30.3 | 21.3 | 23.6 | 20.8 |
| 6. | SEQID12 | 22.8 | 24.3 | 17.6 | 18 | 14.1 | 14.6 | 14.2 | 15.9 | 20.9 | 28 | 20.7 | 25.8 | 21.4 |
| 7. | SEQID14 | 22.7 | 23.9 | 18.6 | 17.7 | 14 | 14.6 | 14.1 | 14.6 | 22.7 | 30.1 | 21.6 | 23.2 | 23.8 |
| 8. | SEQID16 | 28.2 | 31 | 25.7 | 23.4 | 17.9 | 18.4 | 18.2 | 18.9 | 26.9 | 31.3 | 25.6 | 31 | 30.8 |
| 9. | SEQID18 | 14.3 | 14.4 | 12.7 | 12.2 | 10.5 | 11.2 | 12 | 10.9 | 14.1 | 14.9 | 14.6 | 13.8 | 14.5 |
| 10. | SEQID20 | 14.7 | 15.9 | 11.9 | 12.1 | 11.2 | 10.4 | 12.6 | 10.6 | 14.1 | 17.1 | 13 | 13.8 | 13.3 |
| 11. | SEQID22 | 14.2 | 15.2 | 13.9 | 11.5 | 10.9 | 9.8 | 11.2 | 10.8 | 15.2 | 16.6 | 13.1 | 15.9 | 14.3 |
| 12. | SEQID24 | 27.5 | 29.8 | 23.5 | 21.4 | 17.3 | 17.1 | 17.2 | 17.8 | 25.3 | 31.1 | 24 | 30.2 | 30.1 |
| 13. | SEQID26 | 13.8 | 16.9 | 13.5 | 14.1 | 11.8 | 11.6 | 10.4 | 10.9 | 15.3 | 12.5 | 15.6 | 15.3 | 15.1 |
| 14. | SEQID28 | 14 | 11.5 | 11.8 | 11 | 9.6 | 9.7 | 9.5 | 8.5 | 13.1 | 15.3 | 12.4 | 12.4 | 12.2 |
| 15. | SEQID30 | 16.1 | 15.9 | 13.4 | 14.2 | 13.6 | 13.8 | 12.7 | 12.3 | 14.9 | 15.9 | 16.6 | 13.7 | 14.7 |
| 16. | SEQID32 | 11.7 | 12.2 | 11.2 | 10.7 | 7.6 | 8.4 | 8.8 | 8.5 | 11 | 13.9 | 12.8 | 12.4 | 12.5 |
| 17. | SEQID34 | 28 | 29.4 | 22.7 | 21.6 | 16.8 | 18 | 16.8 | 16.8 | 28.3 | 33.2 | 26.2 | 33.3 | 29.5 |
| 18. | SEQID36 | 17.4 | 19.2 | 14.7 | 13.4 | 13 | 12.6 | 11.8 | 13.1 | 16.4 | 15.5 | 15.3 | 19.5 | 16.4 |
| 19. | SEQID38 | 12.7 | 12.8 | 10.5 | 12.4 | 9.5 | 9.4 | 10.1 | 10.2 | 14.2 | 13.7 | 14.2 | 14.4 | 12.7 |
| 20. | SEQID40 | 15.1 | 14.6 | 13.4 | 12.4 | 12.5 | 11.2 | 11.2 | 9.9 | 14 | 16.2 | 16.1 | 15.1 | 14.9 |
| 21. | SEQID42 | 22.6 | 21.5 | 19.5 | 18.5 | 15.5 | 16.6 | 16.6 | 15.7 | 23.2 | 28.2 | 23.2 | 22 | 23.1 |
| 22. | SEQID44 | 14.4 | 15.6 | 15.6 | 14.8 | 13.5 | 12.6 | 13.1 | 12.5 | 13.9 | 15.5 | 18.1 | 13.9 | 13.5 |
| 23. | SEQID46 | 16.1 | 16.6 | 14.2 | 14.8 | 11.6 | 13.1 | 10.1 | 12.4 | 14.6 | 13.5 | 16.7 | 14.8 | 15.8 |
| 24. | SEQID48 | 14 | 14.6 | 13.2 | 12.6 | 10.4 | 12 | 10.8 | 11.9 | 13.5 | 16.1 | 13.1 | 14.6 | 14.5 |
| 25. | SEQID50 | 14.5 | 14.5 | 14 | 14.1 | 11.2 | 11.3 | 9.6 | 9.6 | 12.9 | 15 | 13.7 | 13.1 | 16.8 |
| 26. | SEQID52 | 18.6 | 19.7 | 18.3 | 17 | 12.6 | 13.8 | 13.9 | 13.9 | 20.4 | 26 | 20.9 | 19.5 | 20.9 |
| 27. | SEQID54 | 14.5 | 14.4 | 14.9 | 13.7 | 10.6 | 11.2 | 10.4 | 10.5 | 14.8 | 11.9 | 14 | 12.8 | 14.3 |
| 28. | SEQID56 | 15.9 | 13.3 | 12.7 | 12 | 11.1 | 11.5 | 11.5 | 9.8 | 16.4 | 11.7 | 17 | 14.4 | 15.1 |
| 29. | SEQID58 | 15.1 | 14.4 | 13.5 | 13.1 | 10.5 | 12 | 10.8 | 11.5 | 13.7 | 15.3 | 15.9 | 16.1 | 14.3 |
| 30. | SEQID60 | 15.5 | 13.5 | 12.2 | 12.1 | 12.5 | 11.6 | 12.6 | 12.3 | 11.9 | 14.1 | 13.5 | 12.4 | 13.7 |
| 31. | SEQID62 | 12.5 | 12 | 11.8 | 12 | 9.8 | 10.4 | 10.8 | 10.9 | 12.1 | 12.8 | 13.9 | 11.6 | 14.9 |
| 32. | SEQID64 | 15.3 | 16 | 11.3 | 13.4 | 11.6 | 12.6 | 13.4 | 11.3 | 13.3 | 13.2 | 14.1 | 13.8 | 15.8 |
| 33. | SEQID66 | 11 | 12.4 | 9.9 | 9.5 | 7.8 | 7.7 | 8.1 | 8.1 | 12.2 | 13.9 | 10.8 | 11 | 11.6 |
| 34. | SEQID68 | 18 | 18.4 | 15.8 | 14.3 | 13.8 | 13.4 | 14.2 | 12.7 | 17.5 | 17 | 17.2 | 18.7 | 16.2 |
| 35. | SEQID70 | 15.9 | 15.5 | 13.6 | 14.6 | 12.2 | 10.7 | 12.8 | 13.3 | 15.1 | 16.8 | 17.1 | 13.9 | 15.5 |
| 36. | SEQID72 | 22 | 21.2 | 35.1 | 35.3 | 40 | 40 | 37.9 | 39.8 | 34 | 29 | 34.4 | 22.6 | 22.3 |
| 37. | SEQID74 | 16.7 | 17.2 | 12.5 | 13.9 | 12 | 12 | 11.4 | 11.9 | 16.6 | 13 | 17.3 | 17.9 | 15 |
| 38. | SEQID76 | 13 | 11.5 | 13.9 | 12.9 | 10.7 | 11.5 | 9.6 | 11.4 | 14.2 | 13.3 | 16.4 | 14.6 | 16.9 |
| 39. | SEQID78 | 46.4 | 32.7 | 25.1 | 25.5 | 22.1 | 24 | 21.9 | 21 | 26.3 | 24 | 26.6 | 33.5 | 58.2 |
| 40. | SEQID80 | | 31.2 | 27.1 | 25.2 | 20.9 | 22.4 | 21.9 | 21.4 | 29.1 | 24.6 | 28.3 | 34.1 | 47 |
| 41. | SEQID82 | 49.2 | | 24.5 | 25.9 | 20 | 20.3 | 20.1 | 19.9 | 27.6 | 25.8 | 26.9 | 33.1 | 31.8 |
| 42. | SEQID84 | 40.8 | 38.6 | | 71.1 | 36 | 36.3 | 35.8 | 36 | 43.5 | 26.2 | 41.9 | 27.1 | 27.1 |
| 43. | SEQID86 | 38.7 | 37.7 | 79.7 | | 35.5 | 37.9 | 38 | 36.8 | 40 | 24.4 | 41 | 26.2 | 26.9 |
| 44. | SEQID88 | 32.4 | 30.6 | 45.6 | 46.1 | | 64.6 | 55.8 | 53.6 | 34.5 | 19 | 33.7 | 21.1 | 20.1 |
| 45. | SEQID90 | 32.5 | 32.2 | 46.6 | 49.7 | 73 | | 51.3 | 51.7 | 35.1 | 20.1 | 34.9 | 22.3 | 24 |
| 46. | SEQID94 | 31.8 | 32.9 | 47.6 | 51.2 | 67.6 | 65.5 | | 49.7 | 34.8 | 19.4 | 33.7 | 21.5 | 21.3 |
| 47. | SEQID96 | 30.7 | 30.1 | 45.8 | 46.3 | 66.7 | 64.2 | 63.4 | | 34.3 | 18.9 | 34.4 | 21.6 | 21.7 |
| 48. | SEQID100 | 42.1 | 42.1 | 54.3 | 50.1 | 42.8 | 43.8 | 42.4 | 42.9 | | 29.7 | 72.2 | 28.3 | 28.2 |
| 49. | SEQID102 | 35.2 | 36.4 | 33 | 31.2 | 25.5 | 25.9 | 25.2 | 24.4 | 41.2 | | 29.6 | 25.5 | 26.9 |
| 50. | SEQID104 | 44.1 | 42.6 | 51.7 | 49.7 | 41 | 44 | 41.9 | 42.5 | 81.3 | 39.5 | | 27.7 | 27.3 |
| 51. | SEQID106 | 50.3 | 51.7 | 39.3 | 36.7 | 30.3 | 31.1 | 32.3 | 31.6 | 43.7 | 36.2 | 39.5 | | 34.7 |
| 52. | SEQID108 | 61.3 | 49 | 38.2 | 39.1 | 28.9 | 33.2 | 31.3 | 32.3 | 43.9 | 37.2 | 41.2 | 48.6 | |
| 53. | SEQID110 | 34.6 | 39 | 30.1 | 28.2 | 21.1 | 23.1 | 23.5 | 22.4 | 34.2 | 51.6 | 33.9 | 51.6 | 37 |
| 54. | SEQID124 | 33.5 | 35.3 | 30.7 | 28.1 | 22.8 | 24.3 | 21.8 | 24 | 34 | 42.4 | 35.7 | 37.2 | 35.9 |
| 55. | SEQID126 | 31.7 | 37 | 30 | 28.4 | 24.1 | 23.1 | 22.2 | 22.2 | 34.7 | 50.3 | 34.8 | 35.1 | 34.5 |
| 56. | SEQID134 | 36.1 | 37.5 | 32.6 | 30.8 | 24.3 | 24.8 | 24.5 | 23.8 | 34.2 | 41.7 | 34.1 | 37.8 | 36.1 |
| 57. | SEQID140 | 31.1 | 33.5 | 28.8 | 27.2 | 20.1 | 22.3 | 22.3 | 19.2 | 32.9 | 50 | 31.8 | 33.3 | 32.7 |

| | | 53 | 54 | 55 | 56 | 57 |
|---|---|---|---|---|---|---|
| 1. | SEQID2 | 18 | 19.6 | 18.5 | 17 | 17.6 |
| 2. | SEQID4 | 17.2 | 15.7 | 15.6 | 17.1 | 16.4 |
| 3. | SEQID6 | 28.9 | 47.3 | 48.4 | 44.6 | 59.7 |
| 4. | SEQID8 | 26.8 | 60.2 | 52.8 | 53.3 | 44.8 |
| 5. | SEQID10 | 29.8 | 47.5 | 49 | 46.9 | 46.2 |
| 6. | SEQID12 | 28.7 | 50 | 46.1 | 51.1 | 45.8 |
| 7. | SEQID14 | 27.8 | 46.1 | 51.8 | 46.2 | 65.2 |
| 8. | SEQID16 | 34.1 | 29.2 | 25.6 | 27.3 | 27.1 |
| 9. | SEQID18 | 18.7 | 15.1 | 15.3 | 17.9 | 15.1 |
| 10. | SEQID20 | 19.3 | 15 | 15.9 | 13.9 | 14.2 |
| 11. | SEQID22 | 18.5 | 17.7 | 16.5 | 19.2 | 17.4 |
| 12. | SEQID24 | 32.9 | 30.8 | 25.7 | 27.8 | 26.3 |
| 13. | SEQID26 | 19.4 | 20.6 | 18.1 | 19.7 | 19.3 |
| 14. | SEQID28 | 13.4 | 14.2 | 17 | 15 | 13.5 |
| 15. | SEQID30 | 19.8 | 16.7 | 18.4 | 18.6 | 15.6 |
| 16. | SEQID32 | 13.1 | 15.2 | 14.9 | 12.4 | 13.8 |
| 17. | SEQID34 | 40.1 | 27.9 | 30.1 | 25.7 | 30.2 |
| 18. | SEQID36 | 19 | 19.7 | 17.8 | 19.7 | 19.4 |
| 19. | SEQID38 | 19 | 18.8 | 16.1 | 18.4 | 18.1 |
| 20. | SEQID40 | 17.9 | 19.3 | 13.7 | 19.4 | 16.2 |
| 21. | SEQID42 | 24.3 | 36.4 | 33.9 | 35.3 | 35.8 |
| 22. | SEQID44 | 19 | 17.9 | 16.8 | 17.9 | 17.8 |
| 23. | SEQID46 | 20.5 | 19.6 | 19 | 18.4 | 15.6 |
| 24. | SEQID48 | 15.1 | 12.1 | 14.2 | 11.4 | 14.5 |
| 25. | SEQID50 | 12.6 | 14.6 | 16.1 | 16.6 | 16.8 |
| 26. | SEQID52 | 25.2 | 30 | 30.8 | 28.6 | 36.3 |
| 27. | SEQID54 | 15.6 | 14.2 | 17.2 | 14.4 | 15.5 |
| 28. | SEQID56 | 18.2 | 13.9 | 13.8 | 14.1 | 13.1 |
| 29. | SEQID58 | 13.2 | 12.2 | 15 | 10.9 | 14 |
| 30. | SEQID60 | 15.8 | 14 | 14.2 | 14.1 | 13.4 |
| 31. | SEQID62 | 12.2 | 13.9 | 15.1 | 14.9 | 15.2 |
| 32. | SEQID64 | 13.9 | 13.7 | 14 | 10.9 | 14.3 |
| 33. | SEQID66 | 12.1 | 23.1 | 28.8 | 22.8 | 19.5 |
| 34. | SEQID68 | 18.7 | 19 | 17.4 | 17.8 | 17.8 |
| 35. | SEQID70 | 18.6 | 20.1 | 20.5 | 20 | 19.4 |
| 36. | SEQID72 | 17 | 15.2 | 16 | 16.3 | 14.6 |
| 37. | SEQID74 | 21.2 | 19.9 | 21.6 | 20.2 | 20.2 |
| 38. | SEQID76 | 21.3 | 21.5 | 14.9 | 20.6 | 16.8 |
| 39. | SEQID78 | 25.9 | 22.6 | 21.8 | 22.5 | 22.2 |
| 40. | SEQID80 | 25.5 | 22.6 | 21.6 | 24.3 | 23.3 |
| 41. | SEQID82 | 29.2 | 22 | 22.8 | 24.2 | 22.4 |
| 42. | SEQID84 | 21.6 | 19.1 | 19.9 | 19.5 | 18.7 |
| 43. | SEQID86 | 19.3 | 17.9 | 17.9 | 18.1 | 17.2 |
| 44. | SEQID88 | 15.6 | 14.7 | 15.1 | 15.3 | 14.4 |
| 45. | SEQID90 | 16.2 | 14.8 | 15.9 | 15.4 | 14.7 |
| 46. | SEQID94 | 17.3 | 14.5 | 14.9 | 15.7 | 14.1 |
| 47. | SEQID96 | 16.8 | 15 | 15.1 | 14.8 | 13.4 |
| 48. | SEQID100 | 24.2 | 21.2 | 24 | 20.7 | 21.1 |
| 49. | SEQID102 | 33.3 | 26.1 | 28.2 | 25.9 | 30.2 |
| 50. | SEQID104 | 22.8 | 21.8 | 24 | 21.5 | 22 |
| 51. | SEQID106 | 46.2 | 23.5 | 24.1 | 25.3 | 22 |
| 52. | SEQID108 | 25.9 | 22.8 | 23.8 | 22.2 | 23.2 |
| 53. | SEQID110 | | 27.4 | 29.2 | 27.4 | 27.9 |
| 54. | SEQID124 | 44 | | 54.2 | 54.9 | 44 |
| 55. | SEQID126 | 44.6 | 64.1 | | 54.5 | 49.8 |
| 56. | SEQID134 | 40.8 | 68 | 65.6 | | 43.8 |
| 57. | SEQID140 | 41.8 | 55.1 | 59.8 | 52.6 | |

### Example 4

### Identification of Domains Comprised in CCA1

[0679] The Integrated Resource of Protein Families, Domains and Sites (InterPro) database is an integrated interface for the commonly used signature databases for text- and sequence-based searches. The InterPro database combines these databases, which use different methodologies and varying degrees of biological information about well-characterized proteins to derive protein signatures. Collaborating databases include SWISS-PROT, PROSITE, TrEMBL, PRINTS, ProDom and Pfam, Smart and TIGRFAMs. Interpro is hosted at the European Bioinformatics Institute in the United Kingdom.

[0680] The results of the InterPro scan of the polypeptide sequence as represented by SEQ ID NO: 2 are presented in Table A2.

TABLE A2
InterPro scan results of the polypeptide sequence
as represented by SEQ ID NO: 2

| Database | Accession number | Accession name |
|---|---|---|
| Interpro | IPR001005 | Myb, DNA-binding |
| PFAM | PF00249 | Myb_DNA-binding |
| SMART | SM00717 | SANT domain |
| PROFILE | PS50090 | MYB_3 |
| Interpro | IPR006447 | Myb-like DNA-binding region, |
| | | SHAQKYF class |
| TIGRFAMs | TIGR01557 | myb_SHAQKYF |
| Interpro | IPR009057 | Homeodomain-like |
| SUPERFAMILY | SSF46689 | Homeodomain_like |

### Example 5

### Topology Prediction of the Polypeptide Sequences Useful in Performing the Methods of the Invention (Subcellular Localization, Transmembrane . . . )

[0681] TargetP 1.1 predicts the subcellular location of eukaryotic proteins. The location assignment is based on the predicted presence of any of the N-terminal pre-sequences: chloroplast transit peptide (cTP), mitochondrial targeting peptide (mTP) or secretory pathway signal peptide (SP). Scores on which the final prediction is based are not really probabilities, and they do not necessarily add to one. However, the location with the highest score is the most likely according to TargetP, and the relationship between the scores (the reliability class) may be an indication of how certain the prediction is. The reliability class (RC) ranges from 1 to 5, where 1 indicates the strongest prediction. TargetP is maintained at the server of the Technical University of Denmark.

[0682] For the sequences predicted to contain an N-terminal presequence a potential cleavage site can also be predicted.

[0683] A number of parameters were selected, such as organism group (non-plant or plant), cutoff sets (none, predefined set of cutoffs, or user-specified set of cutoffs), and the calculation of prediction of cleavage sites (yes or no).

[0684] The results of TargetP 1.1 analysis of the polypeptide sequence as represented by SEQ ID NO: 2 are presented Table A3. The “plant” organism group has been selected, no cutoffs defined, and the predicted length of the transit peptide requested. The subcellular localization of the polypeptide sequence as represented by SEQ ID NO: 2 is likely the cytoplasm or nucleus. However, it should be noticed that the observed effects on yield as described in the present application are not the result of a particular localisation of the protein.

TABLE A3
TargetP 1.1 analysis of the polypeptide sequence as
represented by SEQ ID NO: 2

| | |
|---|---|
| Length (AA) | 608 |
| Chloroplastic transit peptide | 0.160 |
| Mitochondrial transit peptide | 0.149 |
| Secretory pathway signal peptide | 0.027 |
| Other subcellular targeting | 0.900 |
| Predicted Location | other |
| Reliability class | 2 |
| Predicted transit peptide length | / |

[0685] Many other algorithms can be used to perform such analyses, including:
[0686] ChloroP 1.1 hosted on the server of the Technical University of Denmark;
[0687] Protein Prowler Subcellular Localisation Predictor version 1.2 hosted on the server of the Institute for Molecular Bioscience, University of Queensland, Brisbane, Australia;
[0688] PENCE Proteome Analyst PA-GOSUB 2.5 hosted on the server of the University of Alberta, Edmonton, Alberta, Canada;
[0689] TMHMM, hosted on the server of the Technical University of Denmark

### Example 6

### Assay Related to the CCA1 Polypeptide Sequences

[0690] CCA1-like proteins (at least in their native form) typically have DNA binding activity. DNA binding assays are part of the state of the art (see for example Current Protocols in Molecular Biology, Volumes 1 and 2, Ausubel et al. (1994), Current Protocols). In particular, a DNA binding assay for CCA1-like transcription factors using the A2 fragment of the Lhcb1*3 gene is described in Wang et al. (Plant Cell 9, 497-507, 1197). Briefly, polypeptides comprising the MYB repeat were expressed and purified, and used in an Electrophoretic Mobility Shift Assay (EMSA). The purified polypeptides were incubated with radiolabeled and purified A2 fragment of the Lhcb1*3 gene and poly (dIdC) during 15 minutes at 30° C. Next, the samples were separated on a 8% polyacrylamide gel and autoradiographed. Protein bands corresponding to CCA1 clearly bound radioactive probe, indicative of the formation of a protein-DNA complex.

[0691] Furthermore, overexpression of a CCA1-like protein in a plant leads to delayed flowering and abolishes the circadian expression of Lhcb or other circadianly expressed genes in continuous light or continuous dark conditions. Alternatively, expression of a CCA1-like protein according to the methods of the present invention results in increased seed yield as described below.

### Example 7

### Cloning of Nucleic Acid Sequence as Represented by SEQ ID NO: 1

[0692] Unless otherwise stated, recombinant DNA techniques are performed according to standard protocols described in (Sambrook (2001) Molecular Cloning: a laboratory manual, 3rd Edition Cold Spring Harbor Laboratory Press, CSH, New York) or in Volumes 1 and 2 of Ausubel et al. (1994), Current Protocols in Molecular Biology, Current Protocols. Standard materials and methods for plant molecular work are described in Plant Molecular Biology Labfax (1993) by R. D. D. Croy, published by BIOS Scientific Publications Ltd (UK) and Blackwell Scientific Publications (UK).

[0693] The Arabidopsis thaliana CCA1-like gene was amplified by PCR using as template an Arabidopsis thaliana seedling cDNA library (Invitrogen, Paisley, UK). Primers prm07263 (SEQ ID NO: 146; sense, start codon in bold, AttB1 site in italic: 5′-ggggacaagtttgtacaaaaaagcaggcttaaacaatggagacaaattcgtctgga-3′) and prm07264: (SEQ ID NO: 147; reverse, complementary, AttB2 site in italic: 5′-ggggaccactttgtacaagaaagctgggtgaaaatagagtctcatgtggaagc-3′), which include the AttB sites for Gateway recombination, were used for PCR amplification. PCR was performed using Hifi Taq DNA polymerase in standard conditions. A PCR fragment was amplified and purified also using standard methods. The first step of the Gateway procedure, the BP reaction, was then performed, during which the PCR fragment recombines in vivo with the pDONR201 plasmid to produce, according to the Gateway terminology, an “entry clone”, pCCA1. Plasmid pDONR201 was purchased from Invitrogen, as part of the Gateway® technology.

### Example 8

### Expression Vector Construction Using the Nucleic Acid Sequence as Represented by SEQ ID NO: 1

[0694] The entry clone pCCA1 was subsequently used in an LR reaction with pGOS2, a destination vector used for Oryza sativa transformation. This vector contains as functional elements within the T-DNA borders: a plant selectable marker; a screenable marker expression cassette; and a Gateway cassette intended for LR in vivo recombination with the nucleic acid sequence of interest already cloned in the entry clone. A rice GOS2 promoter (SEQ ID NO: 145) for constitutive expression was located upstream of this Gateway cassette.

[0695] After the LR recombination step, the resulting expression vector pGOS2::CCA1 (FIG. 3) was transformed into Agrobacterium strain LBA4044 according to methods well known in the art.

### Example 9

### Plant Transformation

### Rice Transformation

[0696] The Agrobacterium containing the expression vector was used to transform Oryza sativa plants. Mature dry seeds of the rice japonica cultivar Nipponbare were dehusked. Sterilization was carried out by incubating for one minute in 70% ethanol, followed by 30 minutes in 0.2% HgCl₂, followed by a 6 times 15 minutes wash with sterile distilled water. The sterile seeds were then germinated on a medium containing 2,4-D (callus induction medium). After incubation in the dark for four weeks, embryogenic, scutellum-derived calli were excised and propagated on the same medium. After two weeks, the calli were multiplied or propagated by subculture on the same medium for another 2 weeks. Embryogenic callus pieces were sub-cultured on fresh medium 3 days before co-cultivation (to boost cell division activity).

[0697] Agrobacterium strain LBA4404 containing the expression vector was used for co-cultivation. Agrobacterium was inoculated on AB medium with the appropriate antibiotics and cultured for 3 days at 28° C. The bacteria were then collected and suspended in liquid co-cultivation medium to a density (OD₆₀₀) of about 1. The suspension was then transferred to a Petri dish and the calli immersed in the suspension for 15 minutes. The callus tissues were then blotted dry on a filter paper and transferred to solidified, co-cultivation medium and incubated for 3 days in the dark at 25° C. Co-cultivated calli were grown on 2,4-D-containing medium for 4 weeks in the dark at 28° C. in the presence of a selection agent. During this period, rapidly growing resistant callus islands developed. After transfer of this material to a regeneration medium and incubation in the light, the embryogenic potential was released and shoots developed in the next four to five weeks. Shoots were excised from the calli and incubated for 2 to 3 weeks on an auxin-containing medium from which they were transferred to soil. Hardened shoots were grown under high humidity and short days in a greenhouse.

[0698] Approximately 35 independent T0 rice transformants were generated for one construct. The primary transformants were transferred from a tissue culture chamber to a greenhouse. After a quantitative PCR analysis to verify copy number of the T-DNA insert, only single copy transgenic plants that exhibit tolerance to the selection agent were kept for harvest of T1 seed. Seeds were then harvested three to five months after transplanting. The method yielded single locus transformants at a rate of over 50% (Aldemita and Hodges 1996, Chan et al. 1993, Hiei et al. 1994).

### Corn Transformation

[0699] Transformation of maize (Zea mays) is performed with a modification of the method described by Ishida et al. (1996) Nature Biotech 14(6): 745-50. Transformation is genotype-dependent in corn and only specific genotypes are amenable to transformation and regeneration. The inbred line A188 (University of Minnesota) or hybrids with A188 as a parent are good sources of donor material for transformation, but other genotypes can be used successfully as well. Ears are harvested from corn plant approximately 11 days after pollination (DAP) when the length of the immature embryo is about 1 to 1.2 mm. Immature embryos are cocultivated with Agrobacterium tumefaciens containing the expression vector, and transgenic plants are recovered through organogenesis. Excised embryos are grown on callus induction medium, then maize regeneration medium, containing the selection agent (for example imidazolinone but various selection markers can be used). The Petri plates are incubated in the light at 25° C. for 2-3 weeks, or until shoots develop. The green shoots are transferred from each embryo to maize rooting medium and incubated at 25° C. for 2-3 weeks, until roots develop. The rooted shoots are transplanted to soil in the greenhouse. T1 seeds are produced from plants that exhibit tolerance to the selection agent and that contain a single copy of the T-DNA insert.

### Wheat Transformation

[0700] Transformation of wheat is performed with the method described by Ishida et al. (1996) Nature Biotech 14(6): 745-50. The cultivar Bobwhite (available from CIMMYT, Mexico) is commonly used in transformation. Immature embryos are co-cultivated with Agrobacterium tumefaciens containing the expression vector, and transgenic plants are recovered through organogenesis. After incubation with Agrobacterium, the embryos are grown in vitro on callus induction medium, then regeneration medium, containing the selection agent (for example imidazolinone but various selection markers can be used). The Petri plates are incubated in the light at 25° C. for 2-3 weeks, or until shoots develop. The green shoots are transferred from each embryo to rooting medium and incubated at 25° C. for 2-3 weeks, until roots develop. The rooted shoots are transplanted to soil in the greenhouse. T1 seeds are produced from plants that exhibit tolerance to the selection agent and that contain a single copy of the T-DNA insert.

### Soybean Transformation

[0701] Soybean is transformed according to a modification of the method described in the Texas A&M U.S. Pat. No. 5,164,310. Several commercial soybean varieties are amenable to transformation by this method. The cultivar Jack (available from the Illinois Seed foundation) is commonly used for transformation. Soybean seeds are sterilised for in vitro sowing. The hypocotyl, the radicle and one cotyledon are excised from seven-day old young seedlings. The epicotyl and the remaining cotyledon are further grown to develop axillary nodes. These axillary nodes are excised and incubated with Agrobacterium tumefaciens containing the expression vector. After the cocultivation treatment, the explants are washed and transferred to selection media. Regenerated shoots are excised and placed on a shoot elongation medium. Shoots no longer than 1 cm are placed on rooting medium until roots develop. The rooted shoots are transplanted to soil in the greenhouse. T1 seeds are produced from plants that exhibit tolerance to the selection agent and that contain a single copy of the T-DNA insert.

### Rapeseed/Canola Transformation

[0702] Cotyledonary petioles and hypocotyls of 5-6 day old young seedling are used as explants for tissue culture and transformed according to Babic et al. (1998, Plant Cell Rep 17: 183-188). The commercial cultivar Westar (Agriculture Canada) is the standard variety used for transformation, but other varieties can also be used. Canola seeds are surface-sterilized for in vitro sowing. The cotyledon petiole explants with the cotyledon attached are excised from the in vitro seedlings, and inoculated with Agrobacterium (containing the expression vector) by dipping the cut end of the petiole explant into the bacterial suspension. The explants are then cultured for 2 days on MSBAP-3 medium containing 3 mg/l BAP, 3% sucrose, 0.7% Phytagar at 23° C., 16 hr light. After two days of co-cultivation with Agrobacterium, the petiole explants are transferred to MSBAP-3 medium containing 3 mg/l BAP, cefotaxime, carbenicillin, or timentin (300 mg/l) for 7 days, and then cultured on MSBAP-3 medium with cefotaxime, carbenicillin, or timentin and selection agent until shoot regeneration. When the shoots are 5-10 mm in length, they are cut and transferred to shoot elongation medium (MSBAP-0.5, containing 0.5 mg/l BAP). Shoots of about 2 cm in length are transferred to the rooting medium (MS0) for root induction. The rooted shoots are transplanted to soil in the greenhouse. T1 seeds are produced from plants that exhibit tolerance to the selection agent and that contain a single copy of the T-DNA insert.

### Alfalfa Transformation

[0703] A regenerating clone of alfalfa (Medicago sativa) is transformed using the method of (McKersie et al., 1999 Plant Physiol 119: 839-847). Regeneration and transformation of alfalfa is genotype dependent and therefore a regenerating plant is required. Methods to obtain regenerating plants have been described. For example, these can be selected from the cultivar Rangelander (Agriculture Canada) or any other commercial alfalfa variety as described by Brown D C W and A Atanassov (1985. Plant Cell Tissue Organ Culture 4: 111-112). Alternatively, the RA3 variety (University of Wisconsin) has been selected for use in tissue culture (Walker et al., 1978 Am J Bot 65:654-659). Petiole explants are cocultivated with an overnight culture of Agrobacterium tumefaciens C58C1 pMP90 (McKersie et al., 1999 Plant Physiol 119: 839-847) or LBA4404 containing the expression vector. The explants are cocultivated for 3 d in the dark on SH induction medium containing 288 mg/L Pro, 53 mg/L thioproline, 4.35 g/L K2SO4, and 100 μm acetosyringinone. The explants are washed in half-strength Murashige-Skoog medium (Murashige and Skoog, 1962) and plated on the same SH induction medium without acetosyringinone but with a suitable selection agent and suitable antibiotic to inhibit Agrobacterium growth. After several weeks, somatic embryos are transferred to BOi2Y development medium containing no growth regulators, no antibiotics, and 50 g/L sucrose. Somatic embryos are subsequently germinated on half-strength Murashige-Skoog medium. Rooted seedlings were transplanted into pots and grown in a greenhouse. T1 seeds are produced from plants that exhibit tolerance to the selection agent and that contain a single copy of the T-DNA insert.

### Cotton Transformation

[0704] Cotton is transformed using Agrobacterium tumefaciens according to the method described in U.S. Pat. No. 5,159,135. Cotton seeds are surface sterilised in 3% sodium hypochlorite solution during 20 minutes and washed in distilled water with 500 μg/ml cefotaxime. The seeds are then transferred to SH-medium with 50 μg/ml benomyl for germination. Hypocotyls of 4 to 6 days old seedlings are removed, cut into 0.5 cm pieces and are placed on 0.8% agar. An Agrobacterium suspension (approx. 108 cells per ml, diluted from an overnight culture transformed with the gene of interest and suitable selection markers) is used for inoculation of the hypocotyl explants. After 3 days at room temperature and lighting, the tissues are transferred to a solid medium (1.6 g/l Gelrite) with Murashige and Skoog salts with B5 vitamins (Gamborg et al., Exp. Cell Res. 50:151-158 (1968)), 0.1 mg/l 2,4-D, 0.1 mg/l 6-furfurylaminopurine and 750 μg/ml MgCL2, and with 50 to 100 μg/ml cefotaxime and 400-500 μg/ml carbenicillin to kill residual bacteria. Individual cell lines are isolated after two to three months (with subcultures every four to six weeks) and are further cultivated on selective medium for tissue amplification (30° C., 16 hr photoperiod). Transformed tissues are subsequently further cultivated on non-selective medium during 2 to 3 months to give rise to somatic embryos. Healthy looking embryos of at least 4 mm length are transferred to tubes with SH medium in fine vermiculite, supplemented with 0.1 mg/l indole acetic acid, 6 furfurylaminopurine and gibberellic acid. The embryos are cultivated at 30° C. with a photoperiod of 16 hrs, and plantlets at the 2 to 3 leaf stage are transferred to pots with vermiculite and nutrients. The plants are hardened and subsequently moved to the greenhouse for further cultivation.

### Example 10

### Phenotypic Evaluation Procedure

### 10.1 Evaluation Setup

[0705] Approximately 35 independent T0 rice transformants were generated. The primary transformants were transferred from a tissue culture chamber to a greenhouse for growing and harvest of T1 seed. Seven events, of which the T1 progeny segregated 3:1 for presence/absence of the transgene, were retained. For each of these events, approximately 10 T1 seedlings containing the transgene (hetero- and homo-zygotes) and approximately 10 T1 seedlings lacking the transgene (nullizygotes) were selected by monitoring visual marker expression. The transgenic plants and the corresponding nullizygotes were grown side-by-side at random positions. Greenhouse conditions were of shorts days (12 hours light), 28° C. in the light and 22° C. in the dark, and a relative humidity of 70%.

[0706] Four T1 events were further evaluated in the T2 generation following the same evaluation procedure as for the T1 generation but with more individuals per event. From the stage of sowing until the stage of maturity the plants were passed several times through a digital imaging cabinet. At each time point digital images (2048×1536 pixels, 16 million colours) were taken of each plant from at least 6 different angles.

### 10.2 Statistical Analysis: F-Test

[0707] A two factor ANOVA (analysis of variants) was used as a statistical model for the overall evaluation of plant phenotypic characteristics. An F-test was carried out on all the parameters measured of all the plants of all the events transformed with the gene of the present invention. The F-test was carried out to check for an effect of the gene over all the transformation events and to verify for an overall effect of the gene, also known as a global gene effect. The threshold for significance for a true global gene effect was set at a 5% probability level for the F-test. A significant F-test value points to a gene effect, meaning that it is not only the mere presence or position of the gene that is causing the differences in phenotype.

### 10.3 Parameters Measured

### Biomass-Related Parameter Measurement

[0708] From the stage of sowing until the stage of maturity the plants were passed several times through a digital imaging cabinet. At each time point digital images (2048×1536 pixels, 16 million colours) were taken of each plant from at least 6 different angles.

[0709] The plant aboveground area (or leafy biomass) was determined by counting the total number of pixels on the digital images from aboveground plant parts discriminated from the background. This value was averaged for the pictures taken on the same time point from the different angles and was converted to a physical surface value expressed in square mm by calibration. Experiments show that the aboveground plant area measured this way correlates with the biomass of plant parts above ground. The above ground area is the area measured at the time point at which the plant had reached its maximal leafy biomass. The early vigour is the plant (seedling) aboveground area three weeks post-germination.

### Seed-Related Parameter Measurements

[0710] The mature primary panicles were harvested, counted, bagged, barcode-labelled and then dried for three days in an oven at 37° C. The panicles were then threshed and all the seeds were collected and counted. The filled husks were separated from the empty ones using an air-blowing device. The empty husks were discarded and the remaining fraction was counted again. The filled husks were weighed on an analytical balance. The number of filled seeds was determined by counting the number of filled husks that remained after the separation step. The total seed yield was measured by weighing all filled husks harvested from a plant. Total seed number per plant was measured by counting the number of husks harvested from a plant. Thousand Kernel Weight (TKW) is extrapolated from the number of filled seeds counted and their total weight. The Harvest Index (HI) in the present invention is defined as the ratio between the total seed yield and the above ground area (mm²), multiplied by a factor 10⁶. The total number of flowers per panicle as defined in the present invention is the ratio between the total number of seeds and the number of mature primary panicles. The seed fill rate as defined in the present invention is the proportion (expressed as a %) of the number of filled seeds over the total number of seeds (or florets).

### Example 11

### Results of the Phenotypic Evaluation of the Transgenic Plants

[0711] The results of the evaluation of transgenic rice plants expressing the CCA1 nucleic acid sequence are presented in Table A4. The percentage difference between the transgenics and the corresponding nullizygotes is also shown, with a P value from the F test below 0.05.

[0712] Total seed yield, number of filled seeds, seed fill rate and harvest index are significantly increased in the transgenic plants expressing the nucleic acid sequence useful in performing the methods of the invention, compared to the control plants (in this case, the nullizygotes).

TABLE A4
Results of the evaluation of transgenic rice plants expressing
the nucleic acid sequence useful in performing
the methods of the invention.

| | % Increase in | % Increase in |
|---|---|---|
| Trait | T1 generation | T2 generation |
| Total seed yield | 26.7 | 38.6 |
| Number of filled seeds | 22.9 | 28.6 |
| Fill rate | 11.2 | 9.6 |
| Harvest index | 15.4 | 15.6 |
| Flowers per panicle | 16.5 | 16.9 |
| Thousand Kernel Weight | 2.7 | 7.2 |

### Part II. VPE

### Example 12

### Identification of Sequences Related to VPE Sequences of SEQ ID NO: 149 and SEQ ID NO: 150

[0713] Sequences (full length cDNA, ESTs or genomic) related to SEQ ID NO: 149 and/or protein sequences related to SEQ ID NO: 150 were identified amongst those maintained in the Entrez Nucleotides database at the National Center for Biotechnology Information (NCBI) using database sequence search tools, such as the Basic Local Alignment Tool (BLAST) (Altschul et al. (1990) J. Mol. Biol. 215:403-410; and Altschul et al. (1997) Nucleic Acids Res. 25:3389-3402). The program was used to find regions of local similarity between sequences by comparing nucleic acid or polypeptide sequences to sequence databases and by calculating the statistical significance of matches. The polypeptide encoded by SEQ ID NO: 149 was used for the TBLASTN algorithm, with default settings and the filter to ignore low complexity sequences set off. The output of the analysis was viewed by pairwise comparison, and ranked according to the probability score (E-value), where the score reflects the probability that a particular alignment occurs by chance (the lower the E-value, the more significant the hit). In addition to E-values, comparisons were also scored by percentage identity (percentage identity referring to the number of identical nucleotides (or amino acids) between the two compared nucleic acid (or polypeptide) sequences over a particular length). In some instances, the default parameters were adjusted to modify the stringency of the search.

[0714] Table B1 provides a list of nucleic acid and protein sequences related to the nucleic acid sequence as represented by SEQ ID NO: 149 and the protein sequence represented by SEQ ID NO: 150.

TABLE B1
Nucleic acid sequences related to SEQ ID NO: 149 and corresponding
deduced polypeptides.

| | | Nucleotide (Nt) or | |
|---|---|---|---|
| Name | SEQ ID NO: | protein (PROT) | Origin |
| VPEg | SEQ ID NO: 149 | Nt | Arabidopsis thaliana |
| VPEg | SEQ ID NO: 150 | PROT | Arabidopsis thaliana |
| >TA0704@contig9701 | SEQ ID NO: 151 | Nt | Triticum aestivum |
| >TA0704@contig9701 | SEQ ID NO: 152 | PROT | Triticum aestivum |
| >TA0704@contig15207 | SEQ ID NO: 153 | Nt | Triticum aestivum |
| >TA0704@contig15207 | SEQ ID NO: 154 | PROT | Triticum aestivum |
| >TA0704@contig14121 | SEQ ID NO: 155 | Nt | Triticum aestivum |
| >TA0704@contig14121 | SEQ ID NO: 156 | PROT | Triticum aestivum |
| >TA0704@contig11093 | SEQ ID NO: 157 | Nt | Triticum aestivum |
| >TA0704@contig11093 | SEQ ID NO: 158 | PROT | Triticum aestivum |
| >HV0704@contig6924 | SEQ ID NO: 159 | Nt | Hordeum vulgare |
| >HV0704@contig6924 | SEQ ID NO: 160 | PROT | Hordeum vulgare |
| >GM0604@contig24378 | SEQ ID NO: 161 | Nt | Glycine max |
| >GM0604@contig24378 | SEQ ID NO: 162 | PROT | Glycine max |
| >GM0604@contig20207 | SEQ ID NO: 163 | Nt | Glycine max |
| >GM0604@contig20207 | SEQ ID NO: 164 | PROT | Glycine max |
| >GM0604@contig13648 | SEQ ID NO: 165 | Nt | Glycine max |
| >GM0604@contig13648 | SEQ ID NO: 166 | PROT | Glycine max |
| >BN0204@contig29409 | SEQ ID NO: 167 | Nt | Brassica napa |
| >BN0204@contig29409 | SEQ ID NO: 168 | PROT | Brassica napa |
| >BN0204@contig26590 | SEQ ID NO: 169 | Nt | Brassica napa |
| >BN0204@contig26590 | SEQ ID NO: 170 | PROT | Brassica napa |
| >ZM0404@contig11971 | SEQ ID NO: 171 | Nt | Zea mays |
| >ZM0404@contig11971 | SEQ ID NO: 172 | PROT | Zea mays |
| >AT2G25940 Alpha-VPE | SEQ ID NO: 173 | Nt | Arabidopsis thaliana |
| >AT2G25940 Alpha-VPE | SEQ ID NO: 174 | PROT | Arabidopsis thaliana |
| >AT1G62710 BETA-VPE | SEQ ID NO: 175 | Nt | Arabidopsis thaliana |
| >AT1G62710 BETA-VPE | SEQ ID NO: 176 | PROT | Arabidopsis thaliana |
| >AT3G20210 DELTA-VPE | SEQ ID NO: 177 | Nt | Arabidopsis thaliana |
| >AT3G20210 DELTA-VPE | SEQ ID NO: 178 | PROT | Arabidopsis thaliana |
| >Os01g0559600 | SEQ ID NO: 179 | Nt | Oryza sativa |
| >Os01g0559600 | SEQ ID NO: 180 | PROT | Oryza sativa |
| >Os02g0644000 | SEQ ID NO: 181 | Nt | Oryza sativa |
| >Os02g0644000 | SEQ ID NO: 182 | PROT | Oryza sativa |
| >Os04g0537900 | SEQ ID NO: 183 | Nt | Oryza sativa |
| >Os04g0537900 | SEQ ID NO: 184 | PROT | Oryza sativa |
| >Os05g0593900 | SEQ ID NO: 185 | Nt | Oryza sativa |
| >Os05g0593900 | SEQ ID NO: 186 | PROT | Oryza sativa |
| >Icl_scaff_127.44 | SEQ ID NO: 187 | Nt | Populus trichocarpa |
| >Icl_scaff_127.44 | SEQ ID NO: 188 | PROT | Populus trichocarpa |
| >Icl_scaff_VI.1657 | SEQ ID NO: 189 | Nt | Populus trichocarpa |
| >Icl_scaff_VI.1657 | SEQ ID NO: 190 | PROT | Populus trichocarpa |
| >Icl_scaff_VIII.21 | SEQ ID NO: 191 | Nt | Populus trichocarpa |
| >Icl_scaff_VIII.21 | SEQ ID NO: 192 | PROT | Populus trichocarpa |
| >Le_CAH56498.1_VPEg | SEQ ID NO: 193 | Nt | Solanum lycopersicum |
| >Le_CAH56498.1_VPEg | SEQ ID NO: 194 | PROT | Solanum lycopersicum |
| >Nt_BAC54827.1 VPEg | SEQ ID NO: 195 | Nt | Nicotiana tabacum |
| >Nt_BAC54827.1 VPEg | SEQ ID NO: 196 | PROT | Nicotiana tabacum |
| >So_ABF00019.1_VPEg | SEQ ID NO: 197 | Nt | Saccharum officinarum |
| >So_ABF00019.1_VPEg | SEQ ID NO: 198 | PROT | Saccharum officinarum |
| >Zm_See2a | SEQ ID NO: 199 | Nt | Zea mays |
| >Zm_See2a | SEQ ID NO: 200 | PROT | Zea mays |
| >Zm_See2b | SEQ ID NO: 201 | Nt | Zea mays |
| >Zm_See2b | SEQ ID NO: 202 | PROT | Zea mays |
| >Zm_VPE1 | SEQ ID NO: 203 | Nt | Zea mays |
| >Zm_VPE1 | SEQ ID NO: 204 | PROT | Zea mays |

### Example 13

### Alignment of VPEs

[0715] AlignX from Vector NTI (Invitrogen), based on the popular Clustal algorithm of progressive alignment (Thompson et al. (1997) Nucleic Acids Res 25: 4876-4882; Chenna et al. (2003). Nucleic Acids Res 31: 3497-3500) was used for the alignment of VPE sequences. A phylogenetic tree was constructed using a neighbour-joining clustering algorithm. Default values were used for the gap open penalty of 10, for the gap extension penalty of 0.1 and the selected weight matrix was Blosum 62.

[0716] The result of the multiple sequence alignment performed with AlignX from the Vector NTI (Invitrogen) using default parameters is shown in FIG. 6B. A multiple sequence alignment and the corresponding the phylogenetic tree of VPE polypeptides and peptidases representative of other protein clans was performed using the AlignX from the Vector NTI (Invitrogen) set to default parameters (FIG. 6A). VPE polypeptides cluster together, apart from peptidases belonging a different clan. VPE polypeptides cluster in four subclasses. VPEs in class alpha are the closest to VPEs in class gamma, the class to which SEQ ID NO: 150 belongs.

### Example 14

### Calculation of Global Percentage Identity Between Polypeptide Sequences Useful in Performing the Methods of the Invention

[0717] Global percentages of similarity and identity between full length polypeptide sequences useful in performing the methods of the invention were determined using one of the methods available in the art, the MatGAT (Matrix Global Alignment Tool) software (BMC Bioinformatics. 2003 4:29. MatGAT: an application that generates similarity/identity matrices using protein or DNA sequences. Campanella J J, Bitincka L, Smalley J; software hosted by Ledion Bitincka). MatGAT software generates similarity/identity matrices for DNA or protein sequences without needing pre-alignment of the data. The program performs a series of pair-wise alignments using the Myers and Miller global alignment algorithm (with a gap opening penalty of 12, and a gap extension penalty of 2), calculates similarity and identity using for example Blosum 62 (for polypeptides), and then places the results in a distance matrix. Sequence similarity is shown in the bottom half of the dividing line and sequence identity is shown in the top half of the diagonal dividing line.

[0718] Parameters used in the comparison were:
[0719] Scoring matrix: Blosum62
[0720] First Gap: 12
[0721] Extending gap: 2

[0722] Results of the software analysis are shown in Table B2 for the global similarity and identity over the full length of the polypeptide sequences (excluding the partial polypeptide sequences). Percentage identity is given above the diagonal and percentage similarity is given below the diagonal.

[0723] The percentage identity between VPEs start at about 45% amino acid identity compared to SEQ ID NO: 150.

[0724] Table B2 and B3: MatGAT results for global similarity and identity over the full length of the polypeptide sequences.

TABLE B2
Global similarity amongst VPE polypeptides from dicotyledonous plants.

| | | 1 | 2 | 3 | 4 | 5 | 6 | 7 | 8 | 9 | 10 | 11 | 12 |
|---|---|---|---|---|---|---|---|---|---|---|---|---|---|
| 1. | SEQ ID NO: 150 | | 73.9 | 59 | 71.7 | 87.1 | 48.8 | 73.1 | 73.3 | 80 | 100 | 58.6 | 48.1 |
| 2. | GM0604@contig24378 | 85 | | 57.9 | 78.8 | 75.4 | 49.5 | 75.2 | 75.2 | 73.3 | 73.9 | 57.3 | 49.9 |
| 3. | GM0604@contig20207 | 73.3 | 70.1 | | 57.5 | 58.8 | 44.8 | 56 | 56 | 55.8 | 59 | 66.4 | 43.1 |
| 4. | GM0604@contig13648 | 82.2 | 87.4 | 71.9 | | 74.1 | 50.4 | 74.3 | 73.9 | 70.5 | 71.7 | 58.9 | 50.5 |
| 5. | BN0204@contig29409 | 91.9 | 86.7 | 71.3 | 83.6 | | 48.5 | 75.8 | 73.2 | 79.5 | 87.1 | 57.1 | 47.9 |
| 6. | BN0204@contig26590 | 64.2 | 64.3 | 59.8 | 65.1 | 63.2 | | 50.1 | 49.2 | 49.7 | 48.8 | 47.5 | 76.3 |
| 7. | Le_CAH56498.1_VPEg | 83.8 | 86.2 | 70.3 | 84.6 | 84.2 | 66 | | 81.1 | 73.2 | 73.1 | 57.5 | 50 |
| 8. | Nt_BAC54827.1VPEg | 84.2 | 87.3 | 69.5 | 85.7 | 84.1 | 64.5 | 89 | | 71.1 | 73.3 | 55.8 | 49.9 |
| 9. | AT2G25940 | 89.3 | 85.5 | 70.5 | 83 | 88.1 | 65.9 | 85.2 | 84.9 | | 80 | 57 | 48.6 |
| 10. | AT4G32940 | 100 | 85 | 73.5 | 82.2 | 91.9 | 64.2 | 83.8 | 84.2 | 89.3 | | 58.6 | 48.1 |
| 11. | AT1G62710 | 71.3 | 72 | 78.4 | 72.2 | 71.9 | 62.1 | 71 | 70.8 | 71.8 | 71.3 | | 47.1 |
| 12. | AT3G20210 | 64.4 | 66.5 | 58.4 | 65.1 | 65.1 | 87.6 | 66.5 | 65.9 | 66.5 | 64.4 | 62.8 | |

TABLE B3
Global similarity amongst VPE polypeptides from monocotyledonous plants.

| | | 1 | 2 | 3 | 4 | 5 | 6 | 7 | 8 | 9 | 10 | 11 | 12 | 13 | 14 |
|---|---|---|---|---|---|---|---|---|---|---|---|---|---|---|---|
| 1. | SEQ ID NO 150 | | 67.7 | 41.7 | 46.6 | 68.5 | 55.6 | 67.5 | 67.1 | 67.3 | 66.3 | 67.1 | 49.3 | 57.6 | 54.1 |
| 2. | ZM0404@contig11971 | 81.2 | | 48.1 | 45.7 | 84.8 | 54.7 | 85.4 | 83.4 | 92.2 | 97.3 | 83.4 | 50 | 57.3 | 60 |
| 3. | TA0704@contig9701 | 55.9 | 58.8 | | 31 | 47.1 | 38.6 | 48 | 47.4 | 47.4 | 47.6 | 47.4 | 31 | 38.1 | 47.3 |
| 4. | TA0704@contig15207 | 55.7 | 58 | 43.7 | | 47.9 | 50.9 | 48.5 | 45.3 | 46.5 | 46.5 | 45.3 | 48.1 | 55.9 | 41.7 |
| 5. | TA0704@contig14121 | 81.6 | 92.3 | 58.6 | 58.4 | | 53.2 | 94.1 | 83.4 | 83.5 | 84.6 | 83.4 | 49.5 | 55.9 | 58.2 |
| 6. | TA0704@contig11093 | 70 | 70.6 | 53.6 | 60.5 | 70 | | 55 | 54.9 | 55.6 | 54.8 | 54.9 | 56.9 | 70.6 | 46.8 |
| 7. | HV0704@contig6924 | 79.6 | 92.4 | 57.9 | 58.3 | 95.7 | 70.2 | | 82.4 | 83 | 84.8 | 82.4 | 49.8 | 56.5 | 57.6 |
| 8. | OS_BAB85400_VPEg | 80.8 | 91 | 57.5 | 56.3 | 89 | 70.3 | 87.8 | | 81 | 83 | 100 | 49.1 | 59.2 | 57.5 |
| 9. | So_ABF00019.1_VPE | 81.6 | 96.3 | 59.8 | 57.8 | 91.7 | 71.1 | 91 | 88.8 | | 92 | 81 | 49.4 | 57.9 | 58.4 |
| 10. | ZM_CAC18100.1VPEg | 80.2 | 97.7 | 58.1 | 58.1 | 91.9 | 70.4 | 91.8 | 90 | 95.7 | | 83 | 49.7 | 57.1 | 59.3 |
| 11. | Os01g0559600 | 80.8 | 91 | 57.5 | 56.3 | 89 | 70.3 | 87.8 | 100 | 88.8 | 90 | | 49.1 | 59.2 | 57.5 |
| 12. | Os02g0644000 | 59.3 | 61.3 | 44.3 | 64.7 | 60.6 | 66.4 | 60.5 | 59.9 | 61.9 | 61.2 | 59.9 | | 61 | 43.7 |
| 13. | Os04g0537900 | 71.2 | 72.8 | 52.9 | 63.8 | 72.2 | 82.5 | 71.2 | 72.9 | 73 | 72.4 | 72.9 | 69.8 | | 48.6 |
| 14. | Os05g0593900 | 70.2 | 73.5 | 58.9 | 55.7 | 71.8 | 63.4 | 71.5 | 71.1 | 73.2 | 73.4 | 71.1 | 57 | 65.2 | |

### Example 15

### Identification of Domains Comprised in VPEs

[0725] The Integrated Resource of Protein Families, Domains and Sites (InterPro) database is an integrated interface for the commonly used signature databases for text- and sequence-based searches. The InterPro database combines these databases, which use different methodologies and varying degrees of biological information about well-characterized proteins to derive protein signatures. Collaborating databases include SWISS-PROT, PROSITE, TrEMBL, PRINTS, ProDom and Pfam, Smart and TIGRFAMs. Interpro is hosted at the European Bioinformatics Institute in the United Kingdom.

[0726] The results of the InterPro scan of the polypeptide sequence as represented by SEQ ID NO: 150 are presented in Table B4.

TABLE B4
InterPro scan results of the polypeptide sequence as represented
by SEQ ID NO: 150

| | | | | aa coordinates |
|---|---|---|---|---|
| | Accession | | | in SEQ ID 150 |
| Database | number | Accession name | e-value | for the domain |
| Pfam | PF01650 | Peptidase_C13 | 1.0E125 | 54-478 |

### Example 16

### Topology Prediction for VPEs

[0727] TargetP 1.1 predicts the subcellular location of eukaryotic proteins. The location assignment is based on the predicted presence of any of the N-terminal pre-sequences: chloroplast transit peptide (cTP), mitochondrial targeting peptide (mTP) or secretory pathway signal peptide (SP). Scores on which the final prediction is based are not really probabilities, and they do not necessarily add to one. However, the location with the highest score is the most likely according to TargetP, and the relationship between the scores (the reliability class) may be an indication of how certain the prediction is. The reliability class (RC) ranges from 1 to 5, where 1 indicates the strongest prediction. TargetP is maintained at the server of the Technical University of Denmark.

[0728] For the sequences predicted to contain an N-terminal pre-sequence a potential cleavage site can also be predicted.

[0729] A number of parameters were selected, such as organism group (non-plant or plant), cut-off sets (none, predefined set of cut-offs, or user-specified set of cut-offs), and the calculation of prediction of cleavage sites (yes or no).

[0730] The results of TargetP 1.1 analysis of the polypeptide sequence as represented by SEQ ID NO: 150 are presented Table B5. The “plant” organism group was selected, no cutoffs defined, and the predicted length of the transit peptide requested. The subcellular localization of the polypeptide sequence as represented by SEQ ID NO: 150 is the secretory pathway and the predicted length of the transit peptide is of 20 amino acids starting from the N-terminus (not as reliable as the prediction of the subcellular localization itself, may vary in length of a few amino acids). Highest score was for the secretory pathway signal indicating that there is a high probability that the VPEg protein is targeted to the secretory pathway.

TABLE B5
TargetP 1.1 analysis of the polypeptide sequence as represented
by SEQ ID NO: 150

| | |
|---|---|
| Length (AA) | 494 |
| Mitochondrial transit peptide | 0.108 |
| Secretory pathway signal peptide | 0.966 |
| Other subcellular targeting | 0.006 |
| Predicted Location | Secretory pathway |
| Reliability class | 2 |
| Predicted transit peptide length | 20 |

[0731] Many other algorithms can be used to perform such analyses, including:
[0732] ChloroP 1.1 hosted on the server of the Technical University of Denmark;
[0733] Protein Prowler Subcellular Localisation Predictor version 1.2 hosted on the server of the Institute for Molecular Bioscience, University of Queensland, Brisbane, Australia;
[0734] PENCE Proteome Analyst PA-GOSUB 2.5 hosted on the server of the University of Alberta, Edmonton, Alberta, Canada;
[0735] TMHMM, hosted on the server of the Technical University of Denmark

### Example 17

### Assay for VPEs

[0736] The peptidase activity of VPEg is assayed by incubating the protein with the substrate proteins and determining the cleaved products as previously described (Rojo et al. 2004 Current Biology 14, 1897-1906; Haraiwa et al. 1999, FEBS 447:213-216; Hatsugai et al. 2004, Science 6: Vol. 305. no. 5685, pp. 855-858). The synthetic decapeptide Ser-Glu-Ser-Glu-Asn-Gly-Leu-Glu-Glu-Thr as described by Haraiwa et al. 1999, the carboxypeptidase Y and the VPEg itself are chosen as substrates in the cleavage reaction. Cleaved products are separated by capillary electrophoresis and detected by absorbance at 200 nm or by western blot.

### Example 18

### Cloning of Nucleic Acid Sequence as Represented by SEQ ID NO: 149

[0737] Unless otherwise stated, recombinant DNA techniques were performed according to standard protocols described in (Sambrook (2001) Molecular Cloning: a laboratory manual, 3rd Edition Cold Spring Harbor Laboratory Press, CSH, New York) or in Volumes 1 and 2 of Ausubel et al. (1994), Current Protocols in Molecular Biology, Current Protocols. Standard materials and methods for plant molecular work are described in Plant Molecular Biology Labfax (1993) by R. D. D. Croy, published by BIOS Scientific Publications Ltd (UK) and Blackwell Scientific Publications (UK).

[0738] The Arabidopsis thaliana VPEg gene was amplified by PCR using as template an Arabidopsis thaliana seedling cDNA library (Invitrogen, Paisley, UK). Primers SEQ ID NO: 206; sense, 5′-ggggacaagtttgtacaaaaaagcaggcttaaacaatggccacaacgatgaca-3′) and SEQ ID NO: 207; reverse, complementary, 5′-ggggaccactttgtacaagaaagctgggtcggtttagggtttctatgcac-3′), which include the AttB sites for Gateway recombination, were used for PCR amplification. PCR was performed using Hifi Taq DNA polymerase in standard conditions. A PCR fragment of the expected length (including attB sites) was amplified and purified also using standard methods. The first step of the Gateway procedure, the BP reaction, was then performed, during which the PCR fragment recombined in vivo with the pDONR201 plasmid to produce, according to the Gateway terminology, an “entry clone”, pVPEg. Plasmid pDONR201 was purchased from Invitrogen, as part of the Gateway® technology.

### Example 19

### Expression Vector Construction Using the Nucleic Acid Sequence as Represented by SEQ ID NO: 149

[0739] The entry clone pVPEg was subsequently used in an LR reaction with a destination vector used for Oryza sativa transformation. This vector contains as functional elements within the T-DNA borders: a plant selectable marker; a screenable marker expression cassette; and a Gateway cassette intended for LR in vivo recombination with the nucleic acid sequence of interest already cloned in the entry clone. A rice WSI18 promoter (SEQ ID NO: 205) for seed specific expression was located upstream of this Gateway cassette.

[0740] After the LR recombination step, the resulting expression vector pWSI18::VPE (FIG. 7) was transformed into Agrobacterium strain LBA4044 according to methods well known in the art.

### Example 20

### Plant Transformation

[0741] See Example 9 above for details of plant transformation.

### Example 21

### Phenotypic Evaluation Procedure

[0742] For details see Example 10 above.

### Example 22

### Examples of Abiotic Stress Screens

### Drought Screen

[0743] Plants from a selected number of events are grown in potting soil under normal conditions until they approached the heading stage. They are then transferred to a “dry” section where irrigation is withheld. Humidity probes are inserted in randomly chosen pots to monitor the soil water content (SWC). When SWC go below certain thresholds, the plants are automatically re-watered continuously until a normal level is reached again. The plants are then re-transferred to normal conditions. The rest of the cultivation (plant maturation, seed harvest) is the same as for plants not grown under abiotic stress conditions. Growth and yield parameters are recorded as detailed for growth under normal conditions.

### Salt Stress Screen

[0744] Plants are grown on a substrate made of coco fibers and argex (3 to 1 ratio). A normal nutrient solution is used during the first two weeks after transplanting the plantlets in the greenhouse. After the first two weeks, 25 mM of salt (NaCl) is added to the nutrient solution, until the plants were harvested. Growth and yield parameters are recorded as detailed for growth under normal conditions.

### Reduced Nutrient (Nitrogen) Availability Screen

[0745] Plants from six events (T2 seeds) were grown in potting soil under normal conditions except for the nutrient solution. The pots were watered from transplantation to maturation with a specific nutrient solution containing reduced N nitrogen (N) content, usually between 7 to 8 times less. The rest of the cultivation (plant maturation, seed harvest) was the same as for plants not grown under abiotic stress. Growth and yield parameters were recorded as detailed for growth under normal conditions (see Example 10).

### Example 23

### Results of the Phenotypic Evaluation of the Transgenic Plants

[0746] The results of the evaluation of transgenic rice plants expressing the VPE are presented in Tables B6-B9 (unless otherwise indicated, the results are obtained on plants grown under non-stress conditions). The percentage difference between the transgenics and the corresponding nullizygotes is also shown, with a P value from the F test below 0.05.

[0747] Total seed yield, number of filled seeds, seed fill rate and harvest index are significantly increased, compared to the control plants (in this case, the nullizygotes).

TABLE B6
Results of the evaluation of transgenic rice plants pWSI::VPE.

| Trait | % Increase |
|---|---|
| Total seed yield | 18 |
| Number of filled seeds | 28 |
| Fill rate | 18 |
| Harvest index | 17 |
| Root shoot index | 7 |

[0748] The results of the evaluation of transgenic rice plants grown under reduced nitrogen availability and expressing pWSI::VPE according to Example 19 are given in Table B7 below.

TABLE B7
Results of the evaluation of VPE::pwsi18
under reduced nitrogen availability

| Parameter | % Diff |
|---|---|
| Aboveground biomass | 16.1 |
| Emergence Vigour | 43.2 |
| Total weight seeds | 20.7 |
| No. filled seeds | 18.8 |
| Harvest index | 12.3 |

[0749] The results of the evaluation of transgenic rice plants grown under reduced nitrogen availability and expressing a VPE construct according to Example 19 except where the wsi18 promoter is replaced with a constitutive GOS2 promoter are given in Table B8 below. This same construct with the GOS2 promoter gave the results shown in Table B9 under non-stress conditions.

TABLE B8
Results of the evaluation of VPE::pGOS2
under reduced nitrogen availability

| Parameter | % Diff |
|---|---|
| Aboveground biomass | 5 |
| Root Biomass | 6 |
| Emergence Vigour | 25 |
| No. flowers per panicle | 7 |

TABLE B9
Results of the evaluation of VPE::pGOS2
under non-stress conditions

| Parameter | % Diff |
|---|---|
| Aboveground biomass | 5 |
| Root biomass | 5 |
| Total weight seeds | 8.9 |
| No. filled seed | 8.5 |
| No. flower per panicle | 6.9 |
| No. total seeds | 8.3 |

### Part III. SAP

### Example 24

### Identification of Sequences Related to Sap Sequences According to SEQ ID NO: 210 and SEQ ID NO: 211

[0750] Sequences (full length cDNA, ESTs or genomic) related to SEQ ID NO: 210 and/or protein sequences related to SEQ ID NO: 211 were identified amongst those maintained in the Entrez Nucleotides database at the National Center for Biotechnology Information (NCBI) using database sequence search tools, such as the Basic Local Alignment Tool (BLAST) (Altschul et al. (1990) J. Mol. Biol. 215:403-410; and Altschul et al. (1997) Nucleic Acids Res. 25:3389-3402). The program is used to find regions of local similarity between sequences by comparing nucleic acid or polypeptide sequences to sequence databases and by calculating the statistical significance of matches. The polypeptide encoded by SEQ ID NO: 210 was used for the TBLASTN algorithm, with default settings and the filter to ignore low complexity sequences set off. The output of the analysis was viewed by pairwise comparison, and ranked according to the probability score (E-value), where the score reflects the probability that a particular alignment occurs by chance (the lower the E-value, the more significant the hit). In addition to E-values, comparisons were also scored by percentage identity. Percentage identity refers to the number of identical nucleotides (or amino acids) between the two compared nucleic acid (or polypeptide) sequences over a particular length. In some instances, the default parameters may be adjusted to modify the stringency of the search.

[0751] In addition to the publicly available nucleic acid sequences available at NCBI, proprietary sequence databases are also searched following the same procedure as described herein above.

[0752] Table C1 provides a list of nucleic acid and protein sequences related to the nucleic acid sequence as represented by SEQ ID NO: 210 and the protein sequence represented by SEQ ID NO: 211.

TABLE C1
Nucleic acid sequences related to the SAP-encoding nucleic acid sequence
of SEQ ID NO: 210, and the corresponding deduced polypeptides.

| | | Nucleic acid | Poly-peptide | |
|---|---|---|---|---|
| Name | Source organism | SEQ ID NO: | SEQ ID NO: | Status |
| SAP_Like | Oryza sativa | 210 | 211 | Full length |
| GM0604@contig350. | Glycine maxima | 212 | 213 | Full length |
| TAG01@SIN_31b-CS. | Tagetes spp | 214 | 215 | Partial |
| BN0204@contig380.. | Brassica napa | 216 | 217 | Full length |
| HV0704@contig195 | Hordeum vulgare | 218 | 219 | Full length |
| TA0704@54203527. | Triticum aestivum | 220 | 221 | Partial |
| TA0704@54582401 | Triticum aestivum | 222 | 223 | Partial |
| TA0704@gi_205507 | Triticum aestivum | 224 | 225 | Partial |
| ZM0404@contig115 | Zea mays | 226 | 227 | Partial |
| ZM0404@contig319. | Zea mays | 228 | 229 | Partial |
| OS_AAK92634.1 | Oryza sativa | 230 | 231 | Full length |
| OS_Os01g0205300 | Oryza sativa | 232 | 233 | Full length |
| Mb_ABF70123.1 | Musa balbisiana | 234 | 235 | Full length |
| AT1G06190 | Arabidopsis thaliana | 236 | 237 | Full length |
| AT4g18740 | Arabidopsis thaliana | 238 | 239 | Full length |

### Example 25

### Alignment of SAP-Like Polypeptide Sequences

[0753] Alignment of polypeptide sequences was performed using the AlignX programme from the Vector NTI (Invitrogen) which is based on the popular Clustal algorithm of progressive alignment (Thompson et al. (1997) Nucleic Acids Res 25:4876-4882; Chenna et al. (2003). Nucleic Acids Res 31:3497-3500). Default values are for the gap open penalty of 10, for the gap extension penalty of 0.1 and the selected weight matrix is Blosum 62 (if polypeptides are aligned). Results in FIG. 10 show that SAP-like proteins share regions of high sequence conservation. Motif1, Motif2 and Motif3 represent the regions with highest sequence homology.

[0754] A phylogenetic tree of SAP and SAP-like polypeptides was constructed using a neighbour-joining clustering algorithm as provided in the AlignX programme from the Vector NTI (Invitrogen). FIG. 11 shows how SAP-like polypeptide cluster with SEQ ID NO: 211 rather than with SAP proteins such as SAFB2 polypeptide.

### Example 26

### Calculation of Global Percentage Identity Between SAP-Like Polypeptides

[0755] Global percentages of similarity and identity between full length polypeptide sequences useful in performing the methods of the invention were determined using one of the methods available in the art, the MatGAT (Matrix Global Alignment Tool) software (BMC Bioinformatics. 2003 4:29. MatGAT: an application that generates similarity/identity matrices using protein or DNA sequences. Campanella J J, Bitincka L, Smalley J; software hosted by Ledion Bitincka). MatGAT software generates similarity/identity matrices for DNA or protein sequences without needing pre-alignment of the data. The program performs a series of pair-wise alignments using the Myers and Miller global alignment algorithm (with a gap opening penalty of 12, and a gap extension penalty of 2), calculates similarity and identity using for example Blosum 62 (for polypeptides), and then places the results in a distance matrix. Sequence similarity is shown in the bottom half of the dividing line and sequence identity is shown in the top half of the diagonal dividing line.

[0756] Parameters used in the comparison were:
[0757] Scoring matrix: Blosum62
[0758] First Gap: 12
[0759] Extending gap: 2

[0760] Results of the software analysis are shown in Table C2 for the global similarity and identity over the full length of the polypeptide sequences. Percentage identity is given above the diagonal and percentage similarity is given below the diagonal.

[0761] The percentage identity between the SAP-like polypeptide sequences start at 13% amino acid identity compared to SEQ ID NO: 211.

TABLE C2
MatGAT results for global similarity and identity over the full length of the
polypeptide sequences.

| | 1 | 2 | 3 | 4 | 5 | 6 | 7 | 8 | 9 |
|---|---|---|---|---|---|---|---|---|---|
| 1. SEQ_ID_NO: 211 | | 35.3 | 21.6 | 15 | 57.8 | 14.7 | 32.3 | 34.9 | 20.1 |
| 2. SEQ_ID_NO: 213 | 55.2 | | 23 | 14.7 | 22.5 | 15 | 30.6 | 40.2 | 22.3 |
| 3. SEQ_ID_NO: 217 | 34.1 | 37 | | 19.7 | 13.4 | 18 | 27.2 | 43.1 | 20 |
| 4. SEQ_ID_NO: 219 | 24.5 | 23.9 | 30.6 | | 9.6 | 30.4 | 19.7 | 14.4 | 19.9 |
| 5. SEQ_ID_NO: 231 | 58.5 | 35.1 | 21 | 15.5 | | 8.5 | 18.9 | 22.6 | 13.2 |
| 6. SEQ_ID_NO: 233 | 22.1 | 23.9 | 30.2 | 40.6 | 13.6 | | 19.3 | 12 | 19.5 |
| 7. SEQ_ID_NO: 235 | 46.9 | 42.9 | 47.3 | 31.8 | 27.8 | 29.5 | | 28.9 | 21.3 |
| 8. SEQ_ID_NO: 237 | 52.9 | 53.6 | 52.1 | 23.4 | 34.3 | 19.7 | 40.4 | | 19.9 |
| 9. SEQ_ID_NO: 239 | 35.2 | 35.7 | 36.5 | 33.1 | 22.4 | 31.5 | 40.3 | 32.2 | |

### Example 27

### Identification of Domains Comprised in SEQ ID NO: 211

[0762] Conserved domains in the sequence of SAP-like polypeptide SEQ ID NO: 211 were identified by searching for similarity with protein domains and protein families present in the Pfam database. Table C3 summarizes the domains found. The beginning and end of the conserved domain in SEQ ID NO: 211 is indicated by the corresponding amino acid coordinate.

TABLE C3
Pfam scan results of the polypeptide sequence as represented by SEQ ID NO: 211

| Database/ | | aa | aa | | | | | |
|---|---|---|---|---|---|---|---|---|
| accession | Seq | Coordinate | Coordinate | | | | | Accession |
| number | from | Begin | End | Score | E-value | Alignment | Description | description |
| Pfam/ | DUF1098 | 212 | 250 | 39 | 9.6 | 0.037 | local | Protein of unknown |
| DUF1098 | | | | | | | | function (DUF1098) |
| Pfam/ | Rho_N | 338 | 371 | 35 | 37.7 | 4.70E−10 | local | Rho termination factor, |
| PF07498 | | | | | | | | N-terminal domain |
| Pfam/ | SAP | 339 | 355 | 17 | 12.5 | 0.02 | local | SAP domain |
| PF02037 | | | | | | | | |
| Pfam/ | SAP | 359 | 372 | 14 | 1.6 | 22 | local | SAP domain |
| PF02037 | | | | | | | | |

### Example 28

### Activity Assay Related to SEQ ID NO:211

[0763] DNA binding activity of the rice SAP-like protein in SEQ ID NO: 211 is determined in an in vitro assay as previously reported by Chen et al. 2003. SEQ ID NO: 211 is overexpressed in E. coli cells and purified. The purified protein is incubated with substrate DNA. A DNA fragment of 31 by (base pairs) derived from the rice Waxy gene is chosen as DNA substrate. The Protein-DNA complexes can be identified by electrophoresis in gel retardation assays.

### Example 29

### Cloning of Nucleic Acid Sequence as Represented by SEQ ID NO: 210

[0764] Unless otherwise stated, recombinant DNA techniques are performed according to standard protocols described in (Sambrook (2001) Molecular Cloning: a laboratory manual, 3rd Edition Cold Spring Harbor Laboratory Press, CSH, New York) or in Volumes 1 and 2 of Ausubel et al. (1994), Current Protocols in Molecular Biology, Current Protocols. Standard materials and methods for plant molecular work are described in Plant Molecular Biology Labfax (1993) by R. D. D. Croy, published by BIOS Scientific Publications Ltd (UK) and Blackwell Scientific Publications (UK).

[0765] The Oryza sativa SAP-like gene was amplified by PCR using as template an Oryza sativa seedling cDNA library (Invitrogen, Paisley, UK). Primers prm08655 (SEQ ID NO: 247; sense, 5′-ggggacaagtttgtacaaaaaagcaggcttaaacaatggccacaacgatgacac-3′) and prm08656 (SEQ ID NO: 248; reverse, complementary, 5′-ggggaccactttgtaca agaaagctgggtcggtttagggtttctatgcac-3′), which include the AttB sites for Gateway recombination, were used for PCR amplification. PCR was performed using Hifi Taq DNA polymerase in standard conditions. A PCR fragment of the expected length (including attB sites) was amplified and purified also using standard methods. The first step of the Gateway procedure, the BP reaction, was then performed, during which the PCR fragment recombines in vivo with the pDONR201 plasmid to produce, according to the Gateway terminology, an “entry clone”. Plasmid pDONR201 was purchased from Invitrogen, as part of the Gateway® technology.

### Example 30

### Expression Vector Construction Using the Nucleic Acid Sequence as Represented by SEQ ID NO: 210

[0766] The entry clone containing SEQ ID NO: 210, pSAP-like, was subsequently used in an LR reaction with pRCC3, a destination vector used for Oryza sativa transformation. This vector contains as functional elements within the T-DNA borders: a plant selectable marker; a screenable marker expression cassette; and a Gateway cassette intended for LR in vivo recombination with the nucleic acid sequence of interest already cloned in the entry clone. A rice RCC3 promoter (SEQ ID NO: 246) for root specific expression was located upstream of this Gateway cassette.

[0767] After the LR recombination step, the resulting expression vector pRCC3::SAP-like (FIG. 11) was transformed into Agrobacterium strain LBA4044 according to methods well known in the art.

### Example 31

### Plant Transformation

[0768] See Example 9 above

### Example 32

### Phenotypic Evaluation Procedure

[0769] For details see Examples 10 and Example 22

### Example 33

### Results of the Phenotypic Evaluation of the Transgenic Plants

[0770] The results of the evaluation of transgenic rice plants expressing the nucleic acid sequence useful in performing the methods of the invention are presented in Table C4 to C9. The percentage difference between the transgenics and the corresponding nullizygotes is also shown, with a P value from the F test below 0.1.

[0771] Total seed yield, number of filled seeds, seed fill rate, harvest index, the number of flowers per panicle, the thousand kernel weight, the plant height and the emergence vigour are significantly increased in the transgenic plants expressing the nucleic acid sequence useful in performing the methods of the invention, compared to the control plants (in this case, the nullizygotes).

TABLE C4
Results of the evaluation of rice plants
transformed with pRCC3::SAP-like vector.

| | % Increase in transgenic |
|---|---|
| Trait | versus control plants |
| Total seed yield | 29 |
| Number of filled seeds | 26 |
| Fill rate | 19 |
| Harvest index | 27 |
| Number flower per panicle | 5 |
| TKW | 3 |
| Plant Height | 7 |
| Emergence vigour | 28 |

The SAP-like nucleic acid in these transgenic plants is expressed in the roots under the control of the rice RCC3 promoter.

TABLE C5
Results of the evaluation of rice plants
transformed with pGOS2::SAP-like vector.

| | % Increase in transgenic |
|---|---|
| Trait | versus control plants |
| Total seed yield | 7 |

The SAP-like nucleic acid in these transgenic plants is expressed constitutively under the control of the rice GOS2 promoter (de Pater et al, Plant J Nov; 2(6): 837-44, 1992, WO 2004/065596).

TABLE C6
Results of the evaluation of rice plants
transformed with p(PcR)::SAP-like vector.

| | % Increase in transgenic |
|---|---|
| Trait | versus control plants |
| Total seed yield | 12 |

The SAP-like nucleic acid in these transgenic plants is expressed constitutively under the control of the rice putative protochlorophyllide reductase promoter (WO 2004/070039).

TABLE C7
Results of the evaluation of rice plants tested
under drought conditions as described in Example
22 and transformed a vector pRCC3::SAP-like.

| Parameter | % Diff |
|---|---|
| Total seed weight | 14.2 |
| No. filled seeds | 15.5 |
| Fill rate | 22 |
| Harvest index | 22.6 |

TABLE C8
Results of the evaluation of rice plants tested under
reduced nitrogen availability as described in Example
22 and transformed with a vector pRCC3::SAP-like.

| Parameter | % Diff |
|---|---|
| Aboveground biomass | 9.1 |
| Ermergence vigour | 20.1 |

TABLE C9
Results of the evaluation of rice plants under
drought conditions as described in Example 22 and
transformed with a p(PcR)::SAP-like vector.

| | % Increase in transgenic |
|---|---|
| Trait | versus control plants |
| Seed filling | 14 |

The SAP-like nucleic acid in these transgenic plants is expressed constitutively under the control of the rice putative protochlorophyllide reductase promoter (WO 2004/070039).

### Part IV. RCA

### Example 34

### Identification of Sequences Related to RCA Sequences According to SEQ ID NO: 250 and SEQ ID NO: 251

[0772] Sequences (full length cDNA, ESTs or genomic) related to SEQ ID NO: 250 and/or protein sequences related to SEQ ID NO: 251 were identified amongst those maintained in the Entrez Nucleotides database at the National Center for Biotechnology Information (NCBI) using database sequence search tools, such as the Basic Local Alignment Tool (BLAST) (Altschul et al. (1990) J. Mol. Biol. 215:403-410; and Altschul et al. (1997) Nucleic Acids Res. 25:3389-3402). The program is used to find regions of local similarity between sequences by comparing nucleic acid or polypeptide sequences to sequence databases and by calculating the statistical significance of matches. The polypeptide encoded by SEQ ID NO: 250 was used for the TBLASTN algorithm, with default settings and the filter to ignore low complexity sequences set off. The output of the analysis was viewed by pairwise comparison, and ranked according to the probability score (E-value), where the score reflects the probability that a particular alignment occurs by chance (the lower the E-value, the more significant the hit). In addition to E-values, comparisons were also scored by percentage identity. Percentage identity refers to the number of identical nucleotides (or amino acids) between the two compared nucleic acid (or polypeptide) sequences over a particular length. In some instances, the default parameters may be adjusted to modify the stringency of the search.

[0773] In addition to the publicly available nucleic acid sequences available at NCBI, proprietary sequence databases are also searched following the same procedure as described herein above.

[0774] Table D1 provides a list of nucleic acid and polypeptide sequences related to the nucleic acid sequence as represented by SEQ ID NO: 250 and the protein sequence represented by SEQ ID NO: 251. Such nucleic acid sequences encode naturally occurring beta (short form, or SF) RCA polypeptides, or from alpha (long form, or LF)) RCA polypeptides that have to be truncated or mutated in the C-terminal extension to prevent redox regulation.

TABLE D1
Nucleic acid sequences related to the nucleic acid sequence (SEQ ID NO: 250)
useful in the methods of the present invention, and the corresponding deduced polypeptides.

| | | Nucleic | | Database | |
|---|---|---|---|---|---|
| | | acid SEQ | Polypeptide | accession | |
| Name | Source organism | ID NO: | SEQ ID NO: | number | Status |
| Chlre_RCA | Chlamydomonas | 250 | 251 | AY461703 | Full length |
| | reinhardtii | | | | |
| Chlli_RCA | Chlorococcum littorale | 252 | 253 | Y10657 | Full length |
| Ostta_RCA | Ostreococcus tauri strain | 254 | 255 | CR954204 | Full length |
| | OTTH0595 | | | | |
| Arath_RCA SF | Arabidopsis thaliana | 256 | 257 | NM_179989 | Full length |
| | | | | AT2G39730.2 | |
| Arath_RCA LF | Arabidopsis thaliana | 258 | 259 | X14212 | Full length |
| Aceru_RCA SF | Acer rubrum | 260 | 261 | DQ915973 | Full length |
| Aceru_RCA LF | Acer rubrum | 262 | 263 | DQ915974 | Full length |
| Chequ_RCA SF | Chenopodium quinoa | 264 | 265 | AY117142 | Full length |
| Desan_RCA SF | Deschampsia antartica | 266 | 267 | AY312574 | Full length |
| Desan_RCA LF | Deschampsia antartica | 268 | 269 | AY312573 | Full length |
| Glyma_RCA LF | Glycine max | 270 | 271 | | Full length |
| Goshi_RCA SF | Gossypium hirsutum | 272 | 273 | AF329934 | Full length |
| Horvu_RCA SF | Hordeum vulgare | 274 | 275 | M55447.1_BLYRCAA2 | Full length |
| Horvu_RCA SFII | Hordeum vulgare | 276 | 277 | M55448.1_BLYRCAB | Full length |
| Lartr_RCA SF | Larrea tridentata | 278 | 279 | AY312576 | Full length |
| Lycpe_RCA LF | Lycopersicon pennellii | 280 | 281 | AF037361 | Full length |
| Maldo_RCA SF | Malus domestica | 282 | 283 | Z21794 | Full length |
| Nicta_RCA SF | Nicotiana tabacum | 284 | 285 | U35111 | Full length |
| Orysa_RCA LF | Oryza sativa | 286 | 287 | AB034698 | Full length |
| Orysa_RCA SF | Oryza sativa | 288 | 289 | AB034748 | Full length |
| Phavu_RCA SF | Phaseolus vulgaris | 290 | 291 | AF041068 | Full length |
| Triae_RCA SF | Triticum aestivum | 292 | 293 | AF251264 | Full length |
| Zeama_RCA SF | Zea mays | 294 | 295 | Contig of | Full length |
| | | | | EE034185.1 | |
| | | | | BI675068 | |
| Datgl_RCA | Datisca glomerata | 296 | 297 | AF047352 | Partial |
| Zanae_RCA | Zantedeschia aethiopica | 298 | 299 | AF338240 | Partial |
| Partial 3′ | | | | | |
| Anasp_RCA | Anabaena variabilis | 300 | 301 | CP000117.1 | Full length |
| | ATCC 29413 | | | | |
| Nossp_RCA | Nostoc sp. PCC 7120 | 302 | 303 | BA000019.2 | Full length |
| Synco_RCA | Synechococcus sp. JA- | 304 | 305 | CP000239 | Full length |
| | 3-3Ab | | | | |
| Flabi_RCA | Flaveria bidentis | 313 | 314 | EU202926.1 | Full length |
| Ostlu_RCA | Ostreococcus | 315 | 316 | jgi_Ost99013_31184_eugene. | Full length |
| | lucimarinus | | | 0400010260 | |
| Vigra_RCA | Vigna radiata | 317 | 318 | AF126870 | Full length |
| Volva_RCA | Volvox carteri | 319 | 320 | jgi_Volca1_105291_est | Full length |
| | | | | Ext_fgenesh4_pg. | |
| | | | | C_260106 | |

[0775] In some instances, related sequences have tentatively been assembled and publicly disclosed by research institutions, such as The Institute for Genomic Research (TIGR). The Eukaryotic Gene Orthologs (EGO) database may be used to identify such related sequences, either by keyword search or by using the BLAST algorithm with the nucleic acid sequence or polypeptide sequence of interest. On other instances, special nucleic acid sequence databases have been created for particular organisms, such as by the Joint Genome Institute, for example for Ostreococcus lucimarinus and Volvox carteri.

### Example 35

### Alignment of Relevant Polypeptide Sequences

[0776] AlignX from the Vector NTI (Invitrogen) is based on the popular Clustal algorithm of progressive alignment (Thompson et al. (1997) Nucleic Acids Res 25:4876-4882; Chenna et al. (2003). Nucleic Acids Res 31:3497-3500). A phylogenetic tree can be constructed using a neighbour-joining clustering algorithm. Default values are for the gap open penalty of 10, for the gap extension penalty of 0.1 and the selected weight matrix is Blosum 62 (if polypeptides are aligned).

[0777] The result of the multiple sequence alignment using polypeptides relevant in identifying the ones useful in performing the methods of the invention is shown in FIG. 15. The sequences were aligned using AlignX program from Vector NTI suite (InforMax, Bethesda, Md.). Multiple alignment was done with a gap opening penalty of 10 and a gap extension of 0.01. The beginning of sequence conservation between eukaryotic RCA polypeptides is delineated with a bracket (the amino acid sequence N-terminal upstream of this bracket is considered as comprising the transit peptide for plastidic subcellular targeting), as are the beginning and the end of the AAA domain. The P loop is boxed, and corresponds to Motif 1 as represented by SEQ ID NO: 312. The beginning of the C-terminal extension is also marker with a bracket. Within this C-terminal extension, the Cys residues involved in redox regulation are marked in bold in the alpha (long form or LF) RCA polypeptides. These are preferred targets for site-directed mutagenesis (into Ala residues, for example) to prevent the formation of disulfide bridges, and thus, redox regulation.

### Example 36

### Calculation of Global Percentage Identity Between Polypeptide Sequences Useful in Performing the Methods of the Invention

[0778] Global percentages of similarity and identity between full length polypeptide sequences useful in performing the methods of the invention were determined using one of the methods available in the art, the MatGAT (Matrix Global Alignment Tool) software (BMC Bioinformatics. 2003 4:29. MatGAT: an application that generates similarity/identity matrices using protein or DNA sequences. Campanella J J, Bitincka L, Smalley J; software hosted by Ledion Bitincka). MatGAT software generates similarity/identity matrices for DNA or protein sequences without needing pre-alignment of the data. The program performs a series of pair-wise alignments using the Myers and Miller global alignment algorithm (with a gap opening penalty of 12, and a gap extension penalty of 2), calculates similarity and identity using for example Blosum 62 (for polypeptides), and then places the results in a distance matrix. Sequence similarity is shown in the bottom half of the dividing line and sequence identity is shown in the top half of the diagonal dividing line.

[0779] Parameters used in the comparison were:
[0780] Scoring matrix: Blosum62
[0781] First Gap: 12
[0782] Extending gap: 2

[0783] Results of the software analysis are shown in Table D2 for the global similarity and identity over the full length of the polypeptide sequences (excluding the partial polypeptide sequences). Percentage identity is given above the diagonal and percentage similarity is given below the diagonal.

[0784] The percentage identity between the polypeptide sequences useful in performing the methods of the invention can be as low as 50% amino acid identity compared to SEQ ID NO: 251.

TABLE D2
MatGAT results for global similarity and identity over the full length of the RCA
polypeptide sequences.

| | | 1 | 2 | 3 | 4 | 5 | 6 | 7 | 8 | 9 | 10 | 11 | 12 | 13 | 14 | 15 | 16 | 17 | 18 | 19 | 20 | 21 | 22 | 23 | 24 | 25 |
|---|---|---|---|---|---|---|---|---|---|---|---|---|---|---|---|---|---|---|---|---|---|---|---|---|---|---|
| 1. | Aceru_RCA\LS | | 92 | 77 | 75 | 55 | 72 | 56 | 66 | 77 | 72 | 85 | 79 | 70 | 71 | 80 | 73 | 78 | 73 | 78 | 73 | 53 | 75 | 71 | 75 | 70 |
| 2. | Aceru_RCA\SF | 92 | | 72 | 79 | 59 | 78 | 60 | 72 | 71 | 78 | 79 | 85 | 76 | 77 | 86 | 75 | 85 | 79 | 72 | 78 | 56 | 81 | 77 | 81 | 76 |
| 3. | Arath_RCA\LF | 86 | 80 | | 91 | 54 | 70 | 55 | 60 | 75 | 69 | 78 | 74 | 68 | 69 | 73 | 70 | 72 | 71 | 77 | 71 | 54 | 69 | 69 | 70 | 67 |
| 4. | Arath_RCA\SF | 84 | 88 | 91 | | 59 | 76 | 59 | 66 | 72 | 76 | 75 | 81 | 74 | 76 | 80 | 75 | 79 | 77 | 73 | 78 | 58 | 76 | 76 | 76 | 74 |
| 5. | Chlre_RCA | 66 | 71 | 64 | 70 | | 58 | 76 | 54 | 56 | 59 | 55 | 58 | 59 | 61 | 58 | 54 | 59 | 58 | 56 | 60 | 63 | 58 | 60 | 59 | 59 |
| 6. | Chequ_RCA | 81 | 87 | 78 | 85 | 69 | | 57 | 66 | 70 | 76 | 73 | 81 | 75 | 75 | 80 | 74 | 80 | 79 | 69 | 74 | 59 | 78 | 74 | 79 | 74 |
| 7. | Chlli_RCA | 67 | 72 | 65 | 71 | 87 | 70 | | 52 | 57 | 61 | 55 | 58 | 61 | 62 | 59 | 55 | 57 | 58 | 57 | 60 | 64 | 58 | 61 | 58 | 60 |
| 8. | Datgl_RCA | 73 | 79 | 67 | 74 | 66 | 73 | 67 | | 59 | 65 | 66 | 73 | 63 | 65 | 72 | 63 | 73 | 68 | 61 | 66 | 52 | 69 | 64 | 68 | 64 |
| 9. | Desan_RCA\\LF | 86 | 81 | 84 | 82 | 66 | 80 | 68 | 68 | | 91 | 77 | 72 | 88 | 79 | 72 | 70 | 70 | 70 | 90 | 83 | 55 | 67 | 80 | 70 | 77 |
| 10. | Desan_RCA\SF | 80 | 87 | 77 | 85 | 72 | 86 | 73 | 74 | 91 | | 71 | 79 | 95 | 85 | 78 | 72 | 76 | 76 | 83 | 89 | 59 | 73 | 86 | 76 | 84 |
| 11. | Glyma_RCA | 93 | 86 | 86 | 83 | 66 | 81 | 67 | 72 | 85 | 79 | | 80 | 70 | 71 | 79 | 73 | 79 | 74 | 79 | 74 | 55 | 80 | 71 | 74 | 70 |
| 12. | Goshi_RCA | 86 | 93 | 81 | 88 | 72 | 89 | 71 | 78 | 82 | 88 | 85 | | 77 | 80 | 88 | 75 | 85 | 80 | 75 | 80 | 59 | 82 | 79 | 81 | 78 |
| 13. | Horvu_RCA\SF | 79 | 85 | 76 | 83 | 72 | 85 | 74 | 72 | 89 | 97 | 78 | 87 | | 84 | 76 | 71 | 75 | 76 | 82 | 89 | 59 | 72 | 85 | 76 | 82 |
| 14. | Horvu_RCASFII | 79 | 85 | 76 | 83 | 73 | 83 | 73 | 73 | 85 | 93 | 79 | 87 | 92 | | 77 | 71 | 79 | 75 | 79 | 85 | 59 | 75 | 96 | 78 | 83 |
| 15. | Lartr_RCA\SF | 87 | 94 | 82 | 89 | 71 | 89 | 72 | 79 | 82 | 88 | 86 | 94 | 87 | 87 | | 76 | 84 | 81 | 73 | 78 | 57 | 82 | 77 | 80 | 78 |
| 16. | Lycpe_RCA | 85 | 87 | 81 | 85 | 68 | 82 | 70 | 73 | 82 | 82 | 82 | 84 | 81 | 81 | 85 | | 75 | 85 | 72 | 73 | 55 | 71 | 70 | 71 | 70 |
| 17. | Maldo_RCA\SF | 86 | 94 | 81 | 88 | 71 | 88 | 72 | 79 | 81 | 87 | 85 | 92 | 85 | 87 | 92 | 85 | | 81 | 73 | 78 | 58 | 80 | 78 | 82 | 77 |
| 18. | Nicta_RCA | 83 | 89 | 79 | 86 | 70 | 86 | 71 | 76 | 79 | 83 | 82 | 88 | 84 | 84 | 89 | 90 | 89 | | 71 | 76 | 56 | 77 | 75 | 77 | 75 |
| 19. | Orysa_RCA\LF | 88 | 83 | 84 | 82 | 67 | 79 | 68 | 68 | 95 | 88 | 87 | 84 | 87 | 85 | 83 | 83 | 81 | 80 | | 92 | 56 | 70 | 80 | 72 | 78 |
| 20. | Orysa_RCA\SF | 81 | 88 | 77 | 84 | 71 | 85 | 73 | 73 | 88 | 95 | 81 | 89 | 94 | 91 | 89 | 83 | 87 | 84 | 92 | | 60 | 75 | 86 | 77 | 84 |
| 21. | Ostta_RCA | 65 | 69 | 65 | 71 | 78 | 68 | 78 | 66 | 67 | 72 | 66 | 72 | 72 | 72 | 71 | 67 | 72 | 69 | 67 | 72 | | 57 | 59 | 58 | 59 |
| 22. | Phavu_RCA\SF | 85 | 91 | 81 | 88 | 72 | 87 | 71 | 76 | 82 | 86 | 86 | 90 | 86 | 87 | 92 | 85 | 91 | 88 | 82 | 86 | 70 | | 74 | 76 | 77 |
| 23. | Triae_RCA\SF | 80 | 86 | 77 | 84 | 72 | 85 | 73 | 71 | 86 | 93 | 79 | 87 | 92 | 97 | 87 | 82 | 85 | 84 | 86 | 92 | 72 | 87 | | 77 | 84 |
| 24. | Zanae_RCA\SF | 83 | 90 | 78 | 85 | 72 | 87 | 72 | 75 | 80 | 86 | 82 | 90 | 86 | 86 | 90 | 83 | 90 | 86 | 82 | 87 | 69 | 88 | 86 | | 74 |
| 25. | Zeama_RCA\SF | 80 | 86 | 76 | 83 | 73 | 83 | 72 | 73 | 85 | 92 | 79 | 88 | 91 | 91 | 87 | 81 | 87 | 82 | 87 | 93 | 72 | 87 | 92 | 86 | |

[0785] The percentage identity between the AAA domain of the RCA polypeptide sequences useful in performing the methods of the invention can be increased to 60% amino acid identity compared to SEQ ID NO: 311.

TABLE D3
MatGAT results for global similarity and identity between the AAA domain of the
RCA polypeptide sequences.

| | | 1 | 2 | 3 | 4 | 5 | 6 | 7 | 8 | 9 | 10 | 11 | 12 | 13 | 14 | 15 | 16 | 17 | 18 |
|---|---|---|---|---|---|---|---|---|---|---|---|---|---|---|---|---|---|---|---|
| 1. | AAA_Aceru_RCA | | 69 | 92 | 93 | 82 | 84 | 93 | 93 | 95 | 93 | 95 | 91 | 94 | 91 | 69 | 94 | 78 | 65 |
| 2. | AAA_Anasp_RCA | 81 | | 68 | 68 | 67 | 68 | 67 | 70 | 69 | 67 | 68 | 66 | 68 | 67 | 99 | 69 | 64 | 76 |
| 3. | AAA_Arath_RCA | 96 | 79 | | 92 | 81 | 82 | 92 | 92 | 94 | 92 | 95 | 91 | 92 | 92 | 68 | 94 | 78 | 65 |
| 4. | AAA_Chequ_RCA | 96 | 81 | 95 | | 81 | 82 | 92 | 94 | 96 | 92 | 95 | 94 | 93 | 95 | 68 | 93 | 79 | 64 |
| 5. | AAA_Chlli_RCA | 91 | 82 | 89 | 88 | | 93 | 81 | 80 | 82 | 82 | 81 | 79 | 81 | 80 | 67 | 80 | 80 | 64 |
| 6. | AAA_Chlre_RCA | 90 | 83 | 89 | 88 | 95 | | 83 | 82 | 84 | 83 | 83 | 81 | 82 | 81 | 68 | 81 | 80 | 64 |
| 7. | AAA_Desan_RCA | 97 | 80 | 95 | 95 | 88 | 88 | | 93 | 94 | 98 | 95 | 92 | 92 | 92 | 67 | 94 | 78 | 64 |
| 8. | AAA_Glyma_RCA | 97 | 82 | 95 | 98 | 91 | 91 | 96 | | 97 | 93 | 95 | 91 | 95 | 92 | 70 | 96 | 79 | 65 |
| 9. | AAA_Goshi_RCA | 98 | 81 | 96 | 97 | 90 | 90 | 97 | 99 | | 94 | 98 | 93 | 95 | 95 | 69 | 96 | 80 | 65 |
| 10. | AAA_Horvu_RCA | 97 | 80 | 95 | 96 | 89 | 88 | 98 | 97 | 97 | | 94 | 92 | 91 | 92 | 67 | 95 | 78 | 64 |
| 11. | AAA_Lartr_RCA | 98 | 81 | 97 | 97 | 90 | 89 | 97 | 99 | 99 | 98 | | 95 | 95 | 95 | 68 | 97 | 79 | 65 |
| 12. | AAA_Lycpe_RCA | 97 | 81 | 96 | 97 | 89 | 89 | 97 | 97 | 97 | 98 | 98 | | 91 | 98 | 66 | 94 | 79 | 65 |
| 13. | AAA_Maldo_RCA | 98 | 82 | 95 | 97 | 91 | 92 | 96 | 99 | 98 | 96 | 98 | 96 | | 92 | 68 | 93 | 78 | 67 |
| 14. | AAA_Nicta_RCA | 96 | 80 | 95 | 96 | 89 | 89 | 95 | 97 | 98 | 96 | 97 | 99 | 96 | | 67 | 94 | 79 | 65 |
| 15. | AAA_Nossp_RCA | 81 | 99 | 79 | 80 | 82 | 83 | 79 | 81 | 81 | 80 | 81 | 80 | 81 | 80 | | 69 | 64 | 75 |
| 16. | AAA_Orysa_RCA | 99 | 81 | 97 | 97 | 90 | 90 | 98 | 99 | 99 | 98 | 99 | 98 | 98 | 98 | 81 | | 79 | 65 |
| 17. | AAA_Ostta_RCA | 89 | 80 | 87 | 88 | 89 | 88 | 87 | 89 | 89 | 88 | 88 | 88 | 89 | 88 | 79 | 89 | | 64 |
| 18. | AAA_Synco_RCA | 81 | 85 | 79 | 79 | 81 | 80 | 79 | 81 | 81 | 80 | 81 | 80 | 82 | 80 | 85 | 81 | 82 | |
| 19. | AAA_Triae_RCA | 97 | 80 | 95 | 96 | 88 | 88 | 98 | 97 | 98 | 99 | 98 | 98 | 96 | 96 | 79 | 99 | 87 | 79 |

### Example 37

### Identification of Domains Comprised in Polypeptide Sequences Useful in Performing the Methods of the Invention

[0786] The Integrated Resource of Protein Families, Domains and Sites (InterPro) database is an integrated interface for the commonly used signature databases for text- and sequence-based searches. The InterPro database combines these databases, which use different methodologies and varying degrees of biological information about well-characterized proteins to derive protein signatures. Collaborating databases include SWISS-PROT, PROSITE, TrEMBL, PRINTS, ProDom and Pfam, Smart and TIGRFAMs. Interpro is hosted at the European Bioinformatics Institute in the United Kingdom.

[0787] The results of the InterPro scan of the polypeptide sequence as represented by SEQ ID NO: 251 are presented in Table D4.

TABLE D4
InterPro scan results of the polypeptide
sequence as represented by SEQ ID NO: 251

| Database | Accession number | Accession name |
|---|---|---|
| InterPro | IPR003959 | AAA ATPase, core |
| Pfam | PF00004 | AAA, ATPase family associated |
| | | with various cellular activities; |
| | | Clan: P-loop containing nucleoside |
| | | triphosphate hydrolase superfamily; |
| | | residues 133-331 of SEQ ID NO: 251. |

[0788] A key feature of the AAA family members is that they share a conserved region of about 200 amino acids that contains an ATP-binding site (P-loop). For example, the AAA domain of SEQ ID NO: 251 is as represented by SEQ ID NO: 311.

### Example 38

### Topology Prediction of the Polypeptide Sequences Useful in Performing the methods of the Invention (Subcellular Localization, Transmembrane . . . )

[0789] TargetP 1.1 predicts the subcellular location of eukaryotic proteins. The location assignment is based on the predicted presence of any of the N-terminal pre-sequences: chloroplast transit peptide (cTP), mitochondrial targeting peptide (mTP) or secretory pathway signal peptide (SP). Scores on which the final prediction is based are not really probabilities, and they do not necessarily add to one. However, the location with the highest score is the most likely according to TargetP, and the relationship between the scores (the reliability class) may be an indication of how certain the prediction is. The reliability class (RC) ranges from 1 to 5, where 1 indicates the strongest prediction. TargetP is maintained at the server of the Technical University of Denmark.

[0790] For the sequences predicted to contain an N-terminal presequence a potential cleavage site can also be predicted.

[0791] A number of parameters were selected, such as organism group (non-plant or plant), cutoff sets (none, predefined set of cutoffs, or user-specified set of cutoffs), and the calculation of prediction of cleavage sites (yes or no).

[0792] The subcellular localization of the polypeptide sequence as represented by SEQ ID NO: 251 is the chloroplast, and the predicted length of the transit peptide is of 32 amino acids starting from the N-terminus (not as reliable as the prediction of the subcellular localization itself, may vary in length by a few amino acids). When aligning RCA polypeptides with the RCA polypeptide of SEQ ID NO: 251, it is possible to deduce the length of the transit peptide in the latter (see FIG. 15). Alternatively, in a broader definition, the transit peptide is the amino acid sequence preceding the beginning of sequence conservation between eukaryotic RCA polypeptides, as shown in FIG. 15.

[0793] Many algorithms can be used to perform such analyses, including:
[0794] ChloroP 1.1 hosted on the server of the Technical University of Denmark;
[0795] Protein Prowler Subcellular Localisation Predictor version 1.2 hosted on the server of the Institute for Molecular Bioscience, University of Queensland, Brisbane, Australia;
[0796] PENCE Proteome Analyst PA-GOSUB 2.5 hosted on the server of the University of Alberta, Edmonton, Alberta, Canada;
[0797] TMHMM, hosted on the server of the Technical University of Denmark

### Example 39

### Assay Related to the Polypeptide Sequences Useful in Performing the Methods of the Invention

[0798] ATP hydrolysis by RCA activity is measured by coupling ADP production to NADH oxidation as described by Li et al. ((2005) J Biol Chem 280(26): 24864-24869; and references including therein), RuBisCo activation by RCA activity is assayed spectrophotometrically as reported by Esau et al., ((1996) Arch Biochem Biophys 326: 100-105).

### Example 40

### Cloning of Nucleic Acid Sequence as Represented by SEQ ID NO: 250

[0799] Unless otherwise stated, recombinant DNA techniques are performed according to standard protocols described in (Sambrook (2001) Molecular Cloning: a laboratory manual, 3rd Edition Cold Spring Harbor Laboratory Press, CSH, New York) or in Volumes 1 and 2 of Ausubel et al. (1994), Current Protocols in Molecular Biology, Current Protocols. Standard materials and methods for plant molecular work are described in Plant Molecular Biology Labfax (1993) by R. D. D. Croy, published by BIOS Scientific Publications Ltd (UK) and Blackwell Scientific Publications (UK).

[0800] The nucleic acid sequence used in the methods of the invention was amplified by PCR using as template a Chlamydomonas reinhardtii CC-1690 cDNA library (“Core Library”) (in Lambda ZAP II vector from Stratagene) purchased at the Chlamy Center (formerly the Chlamydomonas Genetics Center) at Duke University, North Carolina, USA. PCR was performed using Hifi Taq DNA polymerase in standard conditions, using 200 ng of template in a 50 μl PCR mix. The primers used were
[0801] prm08444 SEQ ID NO: 310; sense, AttB1 site in lower case: 5′-ggggacaagtttgtacaaaaaagcaggcttaaacaATGCAGGTCACCATGAAGAG-3′; and
[0802] prm08445 SEQ ID NO: 311 reverse, complementary, AttB2 site in lower case: 5′-ggggaccactttgtacaagaaagctgggtCTCCTACAGAGGAGGCACATC-3′,
   which include the AttB sites for Gateway recombination. The amplified PCR fragment was purified also using standard methods. The first step of the Gateway procedure, the BP reaction, was then performed, during which the PCR fragment recombines in vivo with the pDONR201 plasmid to produce, according to the Gateway terminology, an “entry clone”, p15972. Plasmid pDONR201 was purchased from Invitrogen, as part of the Gateway® technology.

### Example 41

### Expression Vector Construction Using the Nucleic Acid Sequence as Represented by SEQ ID NO: 250

[0803] The entry clone comprising SEQ ID NO: 250 was subsequently used in an LR reaction with three different destination vectors used subsequently and individually for Oryza sativa transformation. The vectors contains as functional elements within the T-DNA borders: a plant selectable marker; a screenable marker expression cassette; and a Gateway cassette intended for LR in vivo recombination with the nucleic acid sequence of interest already cloned in the entry clone. The first destination vector comprises upstream of this Gateway cassette the rice GOS2 promoter (SEQ ID NO: 306) for strong constitutive expression, the second destination vector comprises the rice HMGB promoter for constitutive expression (SEQ ID NO: 307), and the third destination vector comprises the rice protochlorophyllide reductase promoter for specific expression in green tissue (SEQ ID NO: 308).

[0804] After the LR recombination step, the resulting expression vectors (FIG. 16) were separately transformed into Agrobacterium strain LBA4044 according to methods well known in the art.

### Example 42

### Plant Transformation

[0805] See Example 9 above

### Example 43

### Phenotypic Evaluation Procedure

[0806] See Examples 10 and 22 above

### Example 44

### Results of the Phenotypic Evaluation of the Transgenic Plants Expressing SEQ ID NO: 250 Under the Control of a Strong Constitutive Promoter

[0807] The results of the evaluation of transgenic rice plants expressing the nucleic acid sequence useful in performing the methods of the invention, under the control of a strong constitutive GOS2 promoter (SEQ ID NO: 306), are presented in Table D5. The percentage difference between the transgenics and the corresponding nullizygotes is also shown, with a P value from the F test below 0.05.

[0808] The transgenic plants expressing the nucleic acid sequence useful in performing the methods of the invention, have increased early vigour and increased TKW compared to the control plants (in this case, the nullizygotes).

TABLE D5
Results of the evaluation of transgenic rice plants expressing the
nucleic acid sequence useful in performing the methods of the invention,
under the control of a strong constitutive GOS2 promoter.

| | % Increase in | % Increase in |
|---|---|---|
| Trait | T1 generation | T2 generation |
| Increased early vigour | 8 | 17 |
| TKW | 7 | 28 |

### Example 45

### Results of the Phenotypic Evaluation of the Transgenic Plants Expressing SEQ ID NO: 250 Under the Control of a Constitutive Promoter

[0809] The results of the evaluation of transgenic rice plants expressing the nucleic acid sequence useful in performing the methods of the invention, under the control of a constitutive HMGB promoter (SEQ ID NO: 307), are presented in Table D6. The percentage difference between the transgenics and the corresponding nullizygotes is also shown, with a P value from the F test below 0.05.

[0810] The transgenic plants expressing the nucleic acid sequence useful in performing the methods of the invention, have increased early vigour, increased aboveground biomass and increased number of filled seeds compared to the control plants (in this case, the nullizygotes). Transgenic plants flower earlier compared to the corresponding nullizygotes, by up to 3 days.

TABLE D6
Results of the evaluation of transgenic rice plants expressing
the nucleic acid sequence useful in performing the methods of the
invention, under the control of a constitutive HMGB promoter.

| | % Increase in | % Increase in |
|---|---|---|
| Trait | T1 generation | T2 generation |
| Increased early vigour | 12 | 8 |
| Increase in aboveground biomass | 11 | 5 |
| Increase in number of (filled) seeds | 11 | 9 |

### Example 46

### Results of the Phenotypic Evaluation of the Transgenic Plants Expressing SEQ ID NO: 250 Under the Control of a Green Tissue-Specific Promoter

[0811] The results of the evaluation of transgenic rice plants expressing the nucleic acid sequence useful in performing the methods of the invention, under the control of a protochlorophyllide reductase (SEQ ID NO: 308) promoter, are presented in Table D7. The percentage difference between the transgenics and the corresponding nullizygotes is also shown, with a P value from the F test below 0.05.

[0812] The transgenic plants expressing the nucleic acid sequence useful in performing the methods of the invention, have increased early vigour compared to the control plants (in this case, the nullizygotes). Transgenic plants flower earlier compared to the corresponding nullizygotes, by up to 4 days.

TABLE D7
Results of the evaluation of transgenic rice plants expressing the
nucleic acid sequence useful in performing the methods of the invention,
under the control of a protochlorophyllide reductase promoter.

| | % Increase in | % Increase in |
|---|---|---|
| Trait | T1 generation | T2 generation |
| Increased early vigour | 18 | 8 |

### Example 47

### Examples of Transformation of Other Crops

[0813] See Example 9 above

### Example 48

### Examples of Abiotic Stress Screens

[0814] See Example 22 above

### Part V. SYPF1

### Example 49

### Identification of Sequences Related to SEQ ID NO: 321 and SEQ ID NO: 322

[0815] Sequences (full length cDNA, ESTs or genomic) related to SEQ ID NO: 321 and/or protein sequences related to SEQ ID NO: 322 were identified amongst those maintained in the Entrez Nucleotides database at the National Center for Biotechnology Information (NCBI) using database sequence search tools, such as the Basic Local Alignment Tool (BLAST) (Altschul et al. (1990) J. Mol. Biol. 215:403-410; and Altschul et al. (1997) Nucleic Acids Res. 25:3389-3402). The program was used to find regions of local similarity between sequences by comparing nucleic acid or polypeptide sequences to sequence databases and by calculating the statistical significance of matches. The polypeptide encoded by SEQ ID NO: 321 was used for the TBLASTN algorithm, with default settings and the filter to ignore low complexity sequences set off. The output of the analysis was viewed by pairwise comparison, and ranked according to the probability score (E-value), where the score reflects the probability that a particular alignment occurs by chance (the lower the E-value, the more significant the hit). In addition to E-values, comparisons were also scored by percentage identity. Percentage identity refers to the number of identical nucleotides (or amino acids) between the two compared nucleic acid (or polypeptide) sequences over a particular length. In some instances, the default parameters may be adjusted to modify the stringency of the search.

[0816] Table E1 provides a list of nucleic acid and protein sequences related to the nucleic acid sequence as represented by SEQ ID NO: 321 and the protein sequence represented by SEQ ID NO: 322.

TABLE E1
Nucleic acid sequences encoding SYPF1
polypeptides and SYPF1 polypeptides.

| | | Nucleic acid | Polypeptide |
|---|---|---|---|
| Name | Source organism | SEQ ID NO: | SEQ ID NO: |
| SEQ ID NO: 322 | Arabidopsis thaliana | 321 | 322 |
| At4g18690 | Arabidopsis thaliana | 323 | 324 |
| At4g18680 | Arabidopsis thaliana | 325 | 326 |
| At4g18650 | Arabidopsis thaliana | 327 | 328 |
| NP_564730.1 | Arabidopsis thaliana | 329 | 330 |
| At5g10030 | Arabidopsis thaliana | 331 | 332 |
| CAA40102.1 | Triticum aestivum | 333 | 334 |
| Os01g0159000 | Oryza sativa | 335 | 336 |
| Os01g0306400 | Oryza sativa | 337 | 338 |
| BAA05470.1 | Nicotiana glauca × | 339 | 330 |
| | Nicotiana langsdorfii | | |
| AAT64037.1 | Gossypium hirsutum | 331 | 332 |
| At4g18690 | Arabidopsis thaliana | — | 333 |
| NP_193603.1 | Arabidopsis thaliana | — | 334 |
| NP_193600.2 | Arabidopsis thaliana | — | 335 |
| P_564730.1 | Arabidopsis thaliana | — | 336 |
| At5g10030 | Arabidopsis thaliana | — | 337 |
| CAA40102.1 | Triticum aestivum | — | 338 |
| OS01g0159000 | Oryza sativa | — | 339 |
| Os01g0306400 | Oryza sativa | — | 340 |
| BAA05470.1 | Nicotiana glauca × | — | 341 |
| | Nicotiana langsdorfii | | |
| AAT64037.1 | Gossypium hirsutum | — | 342 |

### Example 50

### Alignment of SYPF1 Polypeptide Sequences

[0817] Alignment of polypeptide sequences was performed using the AlignX programme from the Vector NTI (Invitrogen) which is based on the popular Clustal algorithm of progressive alignment (Thompson et al. (1997) Nucleic Acids Res 25:4876-4882; Chenna et al. (2003). Nucleic Acids Res 31:3497-3500). Default values are for the gap open penalty of 10, for the gap extension penalty of 0.1 and the selected weight matrix is Blosum 62 (if polypeptides are aligned). Results in FIG. 19 show that SYPF1 polypeptides share regions of high sequence conservation. Motif 1, Motif 2 and Motif 3 represent the regions with highest sequence homology.

[0818] A phylogenetic tree of SYPF1 polypeptides was constructed using a neighbour-joining clustering algorithm as provided in the AlignX programme from the Vector NTI (Invitrogen). FIG. 20 shows how SYPF1 polypeptides cluster with SEQ ID NO: 322.

### Example 51

### Cloning of Nucleic Acid Sequence as Represented by SEQ ID NO: 321

[0819] Unless otherwise stated, recombinant DNA techniques are performed according to standard protocols described in (Sambrook (2001) Molecular Cloning: a laboratory manual, 3rd Edition Cold Spring Harbor Laboratory Press, CSH, New York) or in Volumes 1 and 2 of Ausubel et al. (1994), Current Protocols in Molecular Biology, Current Protocols. Standard materials and methods for plant molecular work are described in Plant Molecular Biology Labfax (1993) by R. D. D. Croy, published by BIOS Scientific Publications Ltd (UK) and Blackwell Scientific Publications (UK).

[0820] The Arabidopsis thaliana SYPF1 gene was amplified by PCR using as template an Arabidopsis thaliana cDNA library (Invitrogen, Paisley, UK). Primers (SEQ ID NO: 353; sense, 5′-ggggacaagtttgtacaaaaaagcaggcttaaacaatgccaaacactagcagctc t-3′) and SEQ ID NO: 354; reverse, complementary, 5′-ggggaccactttgtacaag aaagctgggtagaagcagagcaaagcaaatta-3′), which include the AttB sites for Gateway recombination, were used for PCR amplification. PCR was performed using Hifi Taq DNA polymerase in standard conditions. A PCR fragment of the expected length (including attB sites) was amplified and purified also using standard methods. The first step of the Gateway procedure, the BP reaction, was then performed, during which the PCR fragment recombined in vivo with the pDONR201 plasmid to produce, according to the Gateway terminology, an “entry clone”. Plasmid pDONR201 was purchased from Invitrogen, as part of the Gateway® technology.

### Example 52

### Expression Vector Construction Using the Nucleic Acid Sequence as Represented by SEQ ID NO: 321

[0821] The entry clone comprising SEQ ID NO: 321 was subsequently used in an LR reaction with a destination vector used for Oryza sativa transformation. This vector contained as functional elements within the T-DNA borders: a plant selectable marker; a screenable marker expression cassette; and a Gateway cassette intended for LR in vivo recombination with the nucleic acid sequence of interest already cloned in the entry clone. A rice HMG promoter (SEQ ID NO: 355) for root specific expression was located upstream of this Gateway cassette.

[0822] After the LR recombination step, the resulting expression vector pHMG::SYPF1 (FIG. 21) was transformed into Agrobacterium strain LBA4044 according to methods well known in the art.

### Example 53

### Plant Transformation

[0823] See Example 9 above

### Example 54

### Phenotypic Evaluation Procedure

[0824] See Examples 10 and 22 above

### Example 55

### Results of the Phenotypic Evaluation of the Transgenic Plants

[0825] The results of the evaluation of transgenic rice plants expressing the SYPF1 nucleic acid are as follows.

[0826] There was a statistically significant increase in the fill rate of seeds, the number of filled seeds, the total seed weight and the harvest index compared to corresponding nullizygotes (controls). For the fill rate, the best 3 lines showed a 16% or more increase compared to control plants. In the case of the number of filled seeds, the best 4 lines gave a 19% or more increase compared to control plants. The total weight of seeds was increased in the best 4 lines by 19% or more and, for harvest index, the best 3 lines gave a greater than 20% increase compared to control plants.

1. A method for enhancing yield-related traits in plants relative to control plants, comprising modulating expression in a plant of a nucleic acid encoding a Vacuolar Processing Enzyme (VPE).

2-124. (canceled)

The application's sequence listing, which the Patent Office published only in electronic form, follows.

SEQUENCE LISTING (358 sequences)

SEQ ID NO: 1 - DNA, 1827 bp, Arabidopsis thaliana
atggagacaaattcgtctggagaagatctggttattaagactcggaagccatatacgataacaaagcaacgtgaaaggtggactgaggaagaacataatagattcattgaagctttgaggctttatggtagagcatggcagaagattgaagaacatgtagcaacaaaaactgctgtccagataagaagtcacgctcagaaatttttctccaaggtagagaaagaggctgaagctaaaggtgtagctatgggtcaagcgctagacatagctattcctcctccacggcctaagcgtaaaccaaacaatccttatcctcgaaagacgggaagtggaacgatccttatgtcaaaaacgggtgtgaatgatggaaaagagtcccttggatcagaaaaagtgtcgcatcctgagatggccaatgaagatcgacaacaatcaaagcctgaagagaaaactctgcaggaagacaactgttcagattgtttcactcatcagtatctctctgctgcatcctccatgaataaaagttgtatagagacatcaaacgcaagcactttccgcgagttcttgccttcacgggaagagggaagtcagaataacagggtaagaaaggagtcaaactcagatttgaatgcaaaatctctggaaaacggtaatgagcaaggacctcagacttatccgatgcatatccctgtgctagtgccattggggagctcaataacaagttctctatcacatcctccttcagagccagatagtcatccccacacagttgcaggagattatcagtcgtttcctaatcatataatgtcaacccttttacaaacaccggctctttatactgccgcaactttcgcctcatcattttggcctcccgattctagtggtggctcacctgttccagggaactcacctccgaatctggctgccatggccgcagccactgttgcagctgctagtgcttggtgggctgccaatggattattacctttatgtgctcctcttagttcaggtggtttcactagtcatcctccatctacttttggaccatcatgtgatgtagagtacacaaaagcaagcactttacaacatggttctgtgcagagccgagagcaagaacactccgaggcatcaaaggctcgatcttcactggactcagaggatgttgaaaataagagtaaaccagtttgtcatgagcagccttctgcaacacctgagagtgatgcaaagggttcagatggagcaggagacagaaaacaagttgaccggtcctcgtgtggctcaaacactccgtcgagtagtgatgatgttgaggcggatgcatcagaaaggcaagaggatggcaccaatggtgaggtgaaagaaacgaatgaagacactaataaacctcaaacttcagagtccaatgcacgccgcagtagaatcagctccaatataaccgatccatggaagtctgtgtctgacgagggtcgaattgccttccaagctctcttctccagagaggtattgccgcaaagttttacatatcgagaagaacacagagaggaagaacaacaacaacaagaacaaagatatccaatggcacttgatcttaacttcacagctcagttaacaccagttgatgatcaagaggagaagagaaacacaggatttcttggaatcggattagatgcttcaaagctaatgagtagaggaagaacaggttttaaaccatacaaaagatgttccatggaagccaaagaaagtagaatcctcaacaacaatcctatcattcatgtggaacagaaagatcccaaacggatgcggttggaaactcaagcttccacatga

SEQ ID NO: 2 - protein, 608 aa, Arabidopsis thaliana
METNSSGEDLVIKTRKPYTITKQRERWTEEEHNRFIEALRLYGRAWQKIEEHVATKTAVQIRSHAQKFFSKVEKEAEAKGVAMGQALDIAIPPPRPKRKPNNPYPRKTGSGTILMSKTGVNDGKESLGSEKVSHPEMANEDRQQSKPEEKTLQEDNCSDCFTHQYLSAASSMNKSCIETSNASTFREFLPSREEGSQNNRVRKESNSDLNAKSLENGNEQGPQTYPMHIPVLVPLGSSITSSLSHPPSEPDSHPHTVAGDYQSFPNHIMSTLLQTPALYTAATFASSFWPPDSSGGSPVPGNSPPNLAAMAAATVAAASAWWAANGLLPLCAPLSSGGFTSHPPSTFGPSCDVEYTKASTLQHGSVQSREQEHSEASKARSSLDSEDVENKSKPVCHEQPSATPESDAKGSDGAGDRKQVDRSSCGSNTPSSSDDVEADASERQEDGTNGEVKETNEDTNKPQTSESNARRSRISSNITDPWKSVSDEGRIAFQALFSREVLPQSFTYREEHREEEQQQQEQRYPMALDLNFTAQLTPVDDQEEKRNTGFLGIGLDASKLMSRGRTGFKPYKRCSMEAKESRILNNNPIIHVEQKDPKRMRLETQAST

SEQ ID NO: 3 - DNA, 1938 bp, Arabidopsis thaliana
atggatactaatacatctggagaagaattattagctaaggcaagaaagccatatacaataacaaagcagcgagagcgatggactgaggatgagcatgagaggtttctagaagccttgaggctttatggaagagcttggcaacgaattgaagaacatattgggacaaagactgctgttcagatcagaagtcatgcacaaaagttcttcacaaagttggagaaagaggctgaagttaaaggcatccctgtttgccaagctttggacatagaaattccgcctcctcgtcctaaacgaaaacccaatactccttatcctcgaaagcctgggaacaacggtacatcttcctctcaagtatcatcagcaaaagatgcaaaacttgtttcatcggcctcttcttcacagttgaatcaggcgttcttggatttggaaaaaatgccgttctctgagaaaacatcaactggaaaagaaaatcaagatgagaattgctcgggtgtttctactgtgaacaagtatcccttaccaacgaaacaggtaagtggcgacattgaaacaagtaagacctcaactgtggacaacgcggttcaagatgttcccaagaagaacaaagacaaagatggtaacgatggtactactgtgcacagcatgcaaaactacccttggcatttccacgcagatattgtgaacgggaatatagcaaaatgccctcaaaatcatccctcaggtatggtatctcaagacttcatgtttcatcctatgagagaagaaactcacgggcacgcaaatcttcaagctacaacagcatctgctactactacagcttctcatcaagcgtttccagcttgtcattcacaggatgattaccgttcgtttctccagatatcatctactttctccaatcttattatgtcaactctcctacagaatcctgcagctcatgctgcagctacattcgctgcttcggtctggccttatgcgagtgtcgggaattctggtgattcatcaaccccaatgagctcttctcctccaagtataactgccattgccgctgctacagtagctgctgcaactgcttggtgggcttctcatggacttcttcctgtatgcgctccagctccaataacatgtgttccattctcaactgttgcagttccaactccagcaatgactgaaatggataccgttgaaaatactcaaccgtttgagaaacaaaacacagctctgcgagatcaaaacttggcttcgaaatctccagcttcatcatctgatgattcagatgagactggagtaaccaagctaaatgccgactcaaaaaccaatgatgataaaattgaggaggttgttgttactgccgctgtgcatgactcaaacactgcccagaagaaaaatcttgtggaccgctcatcctgtggctcaaatacaccttcagggagtgacgcagaaactgatgcattagataaaatggagaaagataaagaggatgtgaaggagacagatgagaatcagccagatgttattgagttaaataaccgtaagattaaaatgagagacaacaacagcaacaacaatgcaactactgattcgtggaaggaagtctccgaagagggtcgtatagcgtttcaggctctctttgcaagggaaagattgcctcaaagcttttcgcctcctcaagtggcagagaatgtgaatagaaaacaaagtgacacgtcaatgccattggctcctaatttcaaaagccaggattcttgtgctgcagaccaagaaggagtagtaatgatcggtgttggaacatgcaagagtcttaaaacgagacagacaggatttaagccatacaagagatgttcaatggaagtgaaagagagccaagttgggaacataaacaatcaaagtgatgaaaaagtctgcaaaaggcttcgattggaaggagaagcttctacatga

SEQ ID NO: 4 - protein, 645 aa, Arabidopsis thaliana
MDTNTSGEELLAKARKPYTITKQRERWTEDEHERFLEALRLYGRAWQRIEEHIGTKTAVQIRSHAQKFFTKLEKEAEVKGIPVCQALDIEIPPPRPKRKPNTPYPRKPGNNGTSSSQVSSAKDAKLVSSASSSQLNQAFLDLEKMPFSEKTSTGKENQDENCSGVSTVNKYPLPTKQVSGDIETSKTSTVDNAVQDVPKKNKDKDGNDGTTVHSMQNYPWHFHADIVNGNIAKCPQNHPSGMVSQDFMFHPMREETHGHANLQATTASATTTASHQAFPACHSQDDYRSFLQISSTFSNLIMSTLLQNPAAHAAATFAASVWPYASVGNSGDSSTPMSSSPPSITAIAAATVAAATAWWASHGLLPVCAPAPITCVPFSTVAVPTPAMTEMDTVENTQPFEKQNTALQDQNLASKSPASSSDDSDETGVTKLNADSKTNDDKIEEVVVTAAVHDSNTAQKKNLVDRSSCGSNTPSGSDAETDALDKMEKDKEDVKETDENQPDVIELNNRKIKMRDNNSNNNATTDSWKEVSEEGRIAFQALFARERLPQSFSPPQVAENVNRKQSDTSMPLAPNFKSQDSCAADQEGVVMIGVGTCKSLKTRQTGFKPYKRCSMEVKESQVGNINNQSDEKVCKRLRLEGEAST

SEQ ID NO: 5 - DNA, 882 bp, Arabidopsis thaliana
atgacctcaaccaatccggtggtcgccgaagtaataccggcggaaacttctacagatgctacagagacgacgattgcaacgacggaagctggtgaagcaccggagaagaaggtgaggaaagcttacacaatcaccaagtctagagagagttggactgaaggagaacacgacaagtttctggaagctcttcaattgtttgatcgtgactggaaaaagatagaagattttgttggttcaaagacagttattcagatcaggagccatgcccaaaaatactttctaaaggtccaaaaaaatgggactttagcacatgttccaccccctaggcctaagcgcaaagctgctcatccatatcctcaaaaggcatcgaaaaatgctcaaatgtcgcttcacgtttccatgtcctttcctactcaaataaataacctgcctggatatactccatgggatgatgatacatctgcattgttaaacattgctgtaagtggggttattccaccagaagatgaacttgatactctttgtggagcagaagttgatgttggatcaaatgacatgataagtgaaactagtccttcagcatctggtatcggaagctcaagcagaacactatcagattctaagggtttgagactggcgaaacaagctccctcaatgcatggtcttcctgattttgctgaggtttataacttcattgggagtgtgttcgatcctgacagcaaaggccgcatgaaaaagctcaaggaaatggatcctataaatttcgaaactgttttgctgttgatgagaaacctcacagtgaacttgtcaaaccctgactttgaacctacttctgaatatgttgatgctgcagaggaaggtcatgaacacttaagctcttag

SEQ ID NO: 6 - protein, 293 aa, Arabidopsis thaliana
MTSTNPVVAEVIPAETSTDATETTIATTEAGEAPEKKVRKAYTITKSRESWTEGEHDKFLEALQLFDRDWKKIEDFVGSKTVIQIRSHAQKYFLKVQKNGTLAHVPPPRPKRKAAHPYPQKASKNAQMSLHVSMSFPTQINNLPGYTPWDDDTSALLNIAVSGVIPPEDELDTLCGAEVDVGSNDMISETSPSASGIGSSSRTLSDSKGLRLAKQAPSMHGLPDFAEVYNFIGSVFDPDSKGRMKKLKEMDPINFETVLLLMRNLTVNLSNPDFEPTSEYVDAAEEGHEHLSS

SEQ ID NO: 7 - DNA, 993 bp, Arabidopsis thaliana
atggtctctagaaattctgacggatatttcttggatccgaccggtatgactgttcctggtctcggaccttcctttacagccgccgtttcttcttcttcttcaccaacgacttcttctacggccgtggctgtggcggatgtgacggcgatggtttcttcttcggaggaggatttgagtaagaagattaggaagccttatactattactaagtctagagagagctggacggagcctgagcatgataaattccttgaagctcttcaattgtttgatagagactggaagaagattgaagcttttattggttcaaagacagtgattcagatacgaagtcatgctcagaagtattttcttaaggtacaaaagagtgggaccggtgaacatctccctcctcctcgacctaaaaggaaagccgctcatccatatcctcagaaggctcacaagaatgtgcaactgcaagtaccagggtcattcaagtcaacatctgaaccaaatgacccaagttttatgtttaggcctgagtcttcttcaatgctgatgacttcgccaaccactgctgctgcggctccatggacaaataatgcgcaaacaattagcttcactcccctcccaaaaggagcaggagctaataacaattgttctagtagttctgaaaatactccaagaccacgatccaacagggacgcaagagaccatggaaatgttggccattcattaagagttttaccggactttgcccaagtatacggcttcattggaagtgtgtttgacccatatgcaagtaatcatctacaaaagctgaagaagatggaccccatagatgttgaaacagtgttactattgatgagaaatctatccatcaacttgtctagtcctgactttgaggatcatagacggcttctttcgtcttatgatatcggatctgagacagcaactgatcatggtggagtgaataaaaccttaaacaaagacccacctgaaatctctacttaa

SEQ ID NO: 8 - protein, 330 aa, Arabidopsis thaliana
MVSRNSDGYFLDPTGMTVPGLGPSFTAAVSSSSSPTTSSTAVAVADVTAMVSSSEEDLSKKIRKPYTITKSRESWTEPEHDKFLEALQLFDRDWKKIEAFIGSKTVIQIRSHAQKYFLKVQKSGTGEHLPPPRPKRKAAHPYPQKAHKNVQLQVPGSFKSTSEPNDPSFMFRPESSSMLMTSPTTAAAAPWTNNAQTISFTPLPKGAGANNNCSSSSENTPRPRSNRDARDHGNVGHSLRVLPDFAQVYGFIGSVFDPYASNHLQKLKKMDPIDVETVLLLMRNLSINLSSPDFEDHRRLLSSYDIGSETATDHGGVNKTLNKDPPEIST

SEQ ID NO: 9 - DNA, 864 bp, Arabidopsis thaliana
atggtgactgtaaaccctagccaagctcattgtttgcctatgaaaatgagtctaccgggtttcaatactcttccccacacggcaacaacgataccggtttccatacggagcaataggacgatgtcgttttttgaggatccaacaaagaaggttagaaagccttacactatcaccaaatctagagagaactggacggagcaagaacacgacaagttccttgaagcccttcatctatttgaccgggattggaagaaaataaaggcctttgttggatcaaaaacagtgatacagatacgaagccacgcacagaagtactttctcaaagttcagaagaatgggactaaagaacatctcccacctcctcgaccaaagaggaaagccaatcacccatatccacaaaaagctcctaaatttactctttcttcttcaaacgcattatttcaacatgactacttatacaacactaattcacatccggtgattagcaccacccgtaagcatggattagtgcattgcgatgttagtataccaagttctgttatcaaagaggaatttggtgtctcagagaactgttgcagcactagtagtagtagagataagcagaggactagaatcgttacagagacaaatgaccaagaaagttgtggaaagccacatagagtggcgccaaatttcgctgaagtttacaattttataggaagtgtgtttgatcctaaaacaacaggtcatgtcaagagattaaaggaaatggatccaataaatcttgagacggttctcttactgatgaaaaatttatctgtaaacctgacgagtcccgagtttgatgaacaacggaagttgatatcatcttacaacgccagttag

SEQ ID NO: 10 - protein, 287 aa, Arabidopsis thaliana
MVTVNPSQAHCLPMKMSLPGFNTLPHTATTIPVSIRSNRTMSFFEDPTKKVRKPYTITKSRENWTEQEHDKFLEALHLFDRDWKKIKAFVGSKTVIQIRSHAQKYFLKVQKNGTKEHLPPPRPKRKANHPYPQKAPKFTLSSSNALFQHDYLYNTNSHPVISTTRKHGLVHCDVSIPSSVIKEEFGVSENCCSTSSSRDKQRTRIVTETNDQESCGKPHRVAPNFAEVYNFIGSVFDPKTTGHVKRLKEMDPINLETVLLLMKNLSVNLTSPEFDEQRKLISSYNAS

SEQ ID NO: 11 - DNA, 909 bp, Arabidopsis thaliana
atggtgtccgtaaaccctagacctaagggttttccagttttcgattcctcgaatatgagtttaccaagctccgatggatttggttcgattccggccacgggacggaccagtacggtgtcgttttctgaggatccgacgacgaagattcggaagccgtacacaatcaagaagtcgagagagaattggacagatcaagagcacgataaatttctagaagctcttcacttattcgatagggattggaagaaaatagaagcctttgttggatcaaaaacagtagttcagatacgaagccacgctcagaaatactttctcaaagttcagaagagtggtgctaacgaacatcttccacctcctcgacctaagaggaaagcgagtcatccttatcctataaaggctcctaaaaatgttgcttatacctctctcccgtcttcgagtacattaccgttgcttgagcctggttatttgtatagctctgattcgaagtcattgatgggaaaccaggctgtttgtgcatctacctcttcttcgtggaatcatgaatcgacaaatctgccaaaaccggtgattgaagaggaaccgggagtctcggccacggctcctctcccaaataatcgctgcagacaggaagatacagagagggtacgagcagtgacaaagccaaataacgaagaaagttgtgaaaagccacatagagtgatgccgaattttgctgaagtttacagcttcattggaagtgtcttcgatcccaacacatcaggccacctccagagattaaagcagatggatccaataaatatggaaacggttcttttactgatgcaaaacctgtctgtaaatctgacaagtcccgagtttgcagagcaaaggaggttgatatcatcatacagcgctaaagctttgaaatag

SEQ ID NO: 12 - protein, 302 aa, Arabidopsis thaliana
MVSVNPRPKGFPVFDSSNMSLPSSDGFGSIPATGRTSTVSFSEDPTTKIRKPYTIKKSRENWTDQEHDKFLEALHLFDRDWKKIEAFVGSKTVVQIRSHAQKYFLKVQKSGANEHLPPPRPKRKASHPYPIKAPKNVAYTSLPSSSTLPLLEPGYLYSSDSKSLMGNQAVCASTSSSWNHESTNLPKPVIEEEPGVSATAPLPNNRCRQEDTERVRAVTKPNNEESCEKPHRVMPNFAEVYSFIGSVFDPNTSGHLQRLKQMDPINMETVLLLMQNLSVNLTSPEFAEQRRLISSYSAKALK

SEQ ID NO: 13 - DNA, 849 bp, Arabidopsis thaliana
atgagctcgtcgccgtcaagaaatccaacgaacgccgaagcacctccgccaccaccaacatcgacggatgctgtggcagagggttcgtctaagaaagtgaggaaaccatataccatcaccaagtcaagagagagctggacagaggaagagcacgataagtttcttgaagcacttcaactgtttgatcgtgactggaagaagattgaagattttgttggttcaaagactgtgattcagataaggagtcatgctcaaaaatactttctcaaggttcagaaaaacgggacattagctcatgtgccacctcctcgacctaagcgcaaagcagctcatccgtatcctcaaaaggcatcaaagaacgctcaaatgccacttcaagtttccacgtcttttactactacgcgaaatggcgacatgccgggatatgcttcatgggatgatgcctcaatgctgctaaacagagttatttcaccacaacatgaacttgctactcttcgtggagcagaagctgatattggatcaaagggcttattaaatgttagtagcccttctacatctggcatgggaagctcaagccgaacagtatcaggttctgagattgtaagaaaggctaaacagcctccagtgcttcacggtgttcctgattttgctgaagtttataatttcattgggagtgtctttgatcctgaaacgagaggccatgtggaaaagctcaaggaaatggatcctataaatttcgaaactgttctgttattgatgagaaacctcacagttaacttatcaaaccctgatttagaatccacttcggattgtaatgatgctgcagaggaaagtcctcttatcatatga

SEQ ID NO: 14 - protein, 282 aa, Arabidopsis thaliana
MSSSPSRNPTNAEAPPPPPTSTDAVAEGSSKKVRKPYTITKSRESWTEEEHDKFLEALQLFDRDWKKIEDFVGSKTVIQIRSHAQKYFLKVQKNGTLAHVPPPRPKRKAAHPYPQKASKNAQMPLQVSTSFTTTRNGDMPGYASWDDASMLLNRVISPQHELATLRGAEADIGSKGLLNVSSPSTSGMGSSSRTVSGSEIVRKAKQPPVLHGVPDFAEVYNFIGSVFDPETRGHVEKLKEMDPINFETVLLLMRNLTVNLSNPDLESTSDCNDAAEESPLII

SEQ ID NO: 15 - DNA, 1041 bp, Arabidopsis thaliana
atggccgctgaggatcgaagtgaggaactaagcagcaatgtagaaaatggaagttgcaattccaatgaaggaattaatcctgaaaccagcagtcattggattgaaaacgttgtcaaggttaggaaaccgtacacagtaactaagcagagagagaagtggagtgaggaagagcatgataggtttcttgaagctatcaagctttatggtcgtggttggcgtcaaatccaagaacacataggtacaaaaaccgctgtgcagatacgaagccatgctcaaaagttcttctccaagatggctcaggaagctgacagtagaagtgaaggatcggttaaagcgattgtgatcccgcctcctcgtccaaagagaaaaccggcacatccttatcctcggaaatcgcctgttccatatactcagtctcctccaccaaatttgtcagctatggagaaaggaaccaagtctccaacctcagtgttatcatcgtttggttcagaggatcaagtcaatagatgctcttcgcctaattcgtgtaccagtgacatccaatccattggtgcaacttccattgataaaaagaataactacacaacatccaagcaacctttcaaagatgattctgacattggttcaacacccatttcaagcattactcttttcgggaagattgtccttgtcgcggaagaatctcacaaaccatcctcttacaatgatgatgatcttaaacaaatgacgtgtcaggagaatcactactcagggatgctagttgacactaatttatctcttggtgtatgggaaacgttttgtactggttctaatgcatttggctcggttacagaagcatctgagaacttggagaaaagtgcagagccgataagttcttcatggaaacggttaagctccttagaaaaacaaggatcttgtaatcctgtaaatgcaagtgggttcaggccatacaagagatgcctatcagaaagagaagtaacatcatcattgacgctggtagcttcagatgaaaagaaaagccaaagagcacgtatatgctag

SEQ ID NO: 16 - protein, 346 aa, Arabidopsis thaliana
MAAEDRSEELSSNVENGSCNSNEGINPETSSHWIENVVKVRKPYTVTKQREKWSEEEHDRFLEAIKLYGRGWRQIQEHIGTKTAVQIRSHAQKFFSKMAQEADSRSEGSVKAIVIPPPRPKRKPAHPYPRKSPVPYTQSPPPNLSAMEKGTKSPTSVLSSFGSEDQVNRCSSPNSCTSDIQSIGATSIDKKNNYTTSKQPFKDDSDIGSTPISSITLFGKIVLVAEESHKPSSYNDDDLKQMTCQENHYSGMLVDTNLSLGVWETFCTGSNAFGSVTEASENLEKSAEPISSSWKRLSSLEKQGSCNPVNASGFRPYKRCLSEREVTSSLTLVASDEKKSQRARIC

SEQ ID NO: 17 - DNA, 889 bp, Arabidopsis thaliana
atggccgccgttagtagttcgtcggagaccggagactgcggcgttacgggaaagagagatgagatcatgttgttcggagttagagtcgtggttgatccgatgagaaagtgtgtgagtttgaacaatctctctgattatgaaaagtcttctccggaggatgagatccctaagatagtcaccgccggagctggagatggtgaagataagaacgaaacggatgcgacggtgattgtcgctgacggttacgcctccgccaatgacgctgtccagatttcgtcttcttccggcgggaggaaacgaggggttccatggacagagaacgagcataagaggttcttgattgggttgcagaaagtaggaaaaggagattggaaaggaatatcaagaaactttgtgaagagtaggactcctactcaagtagctagtcatgctcagaaatacttcctccgacgaaccaacctcaaccgtcgccgaagaagatctagcctttttgatatcactactgagacggttacagaaatggccatggagcaagatcctactcaggagaactcaccactacctgaaaccaacatcagctctggacagcaagcgatgcaagtttttactgacgtgccgacaaaaactgagaatgcaccagagacatttcatctcaacgatccatatctggttccagtaaccttccaagcaaagccaacattcaatctaaacacagatgctgctccactttctctcaacctttgtctggcatcctcatttaatcttaacgagcaacccaactcaagacactcggctttcacgatgatgccaagcttcagcgatggagatagcaatagcagcatcatcagagttgcttagagcttaaacccaaggtgaatctacaagacct

SEQ ID NO: 18 - protein, 285 aa, Arabidopsis thaliana
MAAVSSSSETGDCGVTGKRDEIMLFGVRVVVDPMRKCVSLNNLSDYEKSSPEDEIPKIVTAGAGDGEDKNETDATVIVADGYASANDAVQISSSSGGRKRGVPWTENEHKRFLIGLQKVGKGDWKGISRNFVKSRTPTQVASHAQKYFLRRTNLNRRRRRSSLFDITTETVTEMAMEQDPTQENSPLPETNISSGQQAMQVFTDVPTKTENAPETFHLNDPYLVPVTFQAKPTFNLNTDAAPLSLNLCLASSFNLNEQPNSRHSAFTMMPSFSDGDSNSSIIRVA

SEQ ID NO: 19 - DNA, 786 bp, Arabidopsis thaliana
atgtcacgtagttgctcacagtgtggaaacaacggccacaactctcgcacatgtccgacggacataactaccaccggtgacaacaacgacaaaggcggcggggagaaagccatcatgctttttggcgtccgcgtcacggaagcttcatcatcttgttttagaaaaagtgttagtatgaacaatctctctcaattcgatcaaactcctgatcccaacccaaccgatgacggtggttacgcttcagacgacgtcgttcacgcctccggtagaaaccgtgaacgcaaacgaggaactccatggacagaggaagaacatagattgtttcttactggattgcataaagttggaaaaggtgattggagaggaatctctagaaactttgttaaaactcgaacacctactcaggtagcgagtcatgctcagaaatattttctccggcggactaatcagaatcgtcgtcgtcgtagatcaagcctcttcgatatcactcccgattcgtttataggatcatcaaaagaagagaatcagttacagactccattggagctaatccgtccagttccgattcctattccgattccaccgtcgcggaagatggctgatttgaatcttaacaagaaaaaaactccagcgacaacggagatgtttccgctgtcgctgaatttgcagaggccgtcttcgtcgacatcgtcatcgtccaatgaacagaaggcacgtggctcacgtgcctcctcggggttcgaggcgatgtcgagtaatggagatagtataatgggagtggcttga

SEQ ID NO: 20 - protein, 261 aa, Arabidopsis thaliana
MSRSCSQCGNNGHNSRTCPTDITTTGDNNDKGGGEKAIMLFGVRVTEASSSCFRKSVSMNNLSQFDQTPDPNPTDDGGYASDDVVHASGRNRERKRGTPWTEEEHRLFLTGLHKVGKGDWRGISRNFVKTRTPTQVASHAQKYFLRRTNQNRRRRRSSLFDITPDSFIGSSKEENQLQTPLELIRPVPIPIPIPPSRKMADLNLNKKKTPATTEMFPLSLNLQRPSSSTSSSSNEQKARGSRASSGFEAMSSNGDSIMGVA

SEQ ID NO: 21 - DNA, 798 bp, Arabidopsis thaliana
atggccgacggtagtactagttcttcggagtccactaccgcctgcgctggaagcggcacaagaagagagattatgctgttcggagtcagggttgtgcttgacccgatgagaaagtgcgtgagtttgaacaatctgtctgactatgaacagacggcggagactccaaagatcgacggcgaagatagagatgaacaagatatgaacaaaaccccggccggttacgcctcggcggatgaagctcttcccatgtcttcttctaacggcaaaatcgagaggaaacgaggagttccatggactgaagaagaacacaagctgttcttgcttgggctgcagagagtcggtaaaggagattggaaaggaatatcaagaaactttgtcaagaccagaacctctacacaagttgctagtcatgctcagaaatacttcctcaggcgaagtaatcttaaccgtcgccgccgaagatctagcctttttgacatgactactgatacggtcatacccatggaagaagatcaccaagtgcttatacaggagaacacatctcaatcatcttctcctgtaccggaaatcaacaacttctctatacatccggttatgcaagtctttcccgagttcccggtaccaacagggaatcaatcatacggacagcttacttcatcgaatctcatcaatttggttccattaacttttcagtcaagtccagcaccgctttctctcaacctctcactagcttcatctaatcttaatgaaccatctccttcaatgcatccagcattcaacacgattggagtcgcttag

SEQ ID NO: 22 - protein, 265 aa, Arabidopsis thaliana
MADGSTSSSESTTACAGSGTRREIMLFGVRVVLDPMRKCVSLNNLSDYEQTAETPKIDGEDRDEQDMNKTPAGYASADEALPMSSSNGKIERKRGVPWTEEEHKLFLLGLQRVGKGDWKGISRNFVKTRTSTQVASHAQKYFLRRSNLNRRRRRSSLFDMTTDTVIPMEEDHQVLIQENTSQSSSPVPEINNFSIHPVMQVFPEFPVPTGNQSYGQLTSSNLINLVPLTFQSSPAPLSLNLSLASSNLNEPSPSMHPAFNTIGVA

SEQ ID NO: 23 - DNA, 1011 bp, Arabidopsis thaliana
atggtaatgatgattattatatataccgaacccgaaatcagcttgtttccacttcaggatcgaagtgaggaactaagcagcaatgtagaaaatggaagttgcaattccaatgaaggaattaatcctgaaaccagcagtcattggattgaaaacgttgtcaaggttaggaaaccgtacacagtaactaagcagagagagaagtggagtgaggaagagcatgataggtttcttgaagctatcaagctttatggtcgtgggtggcgtcaaatccaagaacacataggtacaaaaaccgctgtacagatacgaagccatgctcaaaagttcttctccaagatggctcaggaagctgacagtagaagtgaaggatcggttaaagcgattgtgatcccgcctcctcgtccaaagagaaaaccggcacatccttatcctcggaaatcgcctgttccatatactcagtctcctccaccaaatttgtcagctatggagaaaggaaccaagtctccaacctcagtgttatcatcgtttggttcagaggatcaaaataactacacaacatccaagcaacctttcaaagatgattctgacattggttcaacacccatttcaagcattactcttttcgggaagattgtccttgtcgcggaagaatctcacaaaccatcctcttacaatgatgatgatcttaaacaaatgacgtgtcaggagaatcactactcagggatgctagttgacactaatttatctcttggtgtatgggaaacgttttgtactggttctaatgcatttggctcggttacagaagcatctgagaacttggagaagagtgcagagccgataagttcttcatggaaacggttaagctccttagaaaaacaaggatcttgtaatcctgtaaatgcaagtgggttcaggccatacaagagatgcctatcagaaagagaagtaacatcatcattgacgctggtagcttcagatgaaaagaaaagccaaagagcacgtatatgctag

SEQ ID NO: 24 - protein, 336 aa, Arabidopsis thaliana
MVMMIIIYTEPEISLFPLQDRSEELSSNVENGSCNSNEGINPETSSHWIENVVKVRKPYTVTKQREKWSEEEHDRFLEAIKLYGRGWRQIQEHIGTKTAVQIRSHAQKFFSKMAQEADSRSEGSVKAIVIPPPRPKRKPAHPYPRKSPVPYTQSPPPNLSAMEKGTKSPTSVLSSFGSEDQNNYTTSKQPFKDDSDIGSTPISSITLFGKIVLVAEESHKPSSYNDDDLKQMTCQENHYSGMLVDTNLSLGVWETFCTGSNAFGSVTEASENLEKSAEPISSSWKRLSSLEKQGSCNPVNASGFRPYKRCLSEREVTSSLTLVASDEKKSQRARIC

SEQ ID NO: 25 - DNA, 864 bp, Arabidopsis thaliana
atggatgcagcaattccgatttggaagagggacgatgataagcgttttgagttagctctggttcgattccctgctgagggttcgccggattttttagagaatatcgctcagtttctgcagaaaccgttaaaggaggtgtactcctactaccaagccttggtcgatgatgttacgctgatcgaatcgggtaagtatcctttgcccaagtacccggaagatgattacgtgtcactgccggaagcgactaagtctaaaacccagggcacggggaaaaagaagggaataccttggtcaccagaagaacacagattgtttttggatggactaaacaagtatgggaaaggagattggaagagcatatcgagggaatgtgtgacgtcaaggagcccgatgcaagtggcaagccatgctcagaagtatttcttaaggcaaaaaaataagaaggggaaacgcttcagtatccatgatatgactctgggagatgccgaaaatgtaaccgtccctgtatccaacttgaattctatgggccagcagccacattttgatgaccaaagtcctccggatcattatcaagactacttctcccagagcaatgtaaccatccctggatgcaacatgcactttatgggccagcaaccacgttttggtgaccaaattcctccgggtgaatatcacccctactcccgggacaatgtaaccgtcactggatccaacttgaattctattggccagcagccacattttaatgaccaaatttctccggatcaatatggccgctacttgcaggaaaacttcgggtttttcgatgatgatggtgaagatgatgggagtttagcaagctttcaacaactatacaaggcttaa

SEQ ID NO: 26 - protein, 287 aa, Arabidopsis thaliana
MDAAIPIWKRDDDKRFELALVRFPAEGSPDFLENIAQFLQKPLKEVYSYYQALVDDVTLIESGKYPLPKYPEDDYVSLPEATKSKTQGTGKKKGIPWSPEEHRLFLDGLNKYGKGDWKSISRECVTSRSPMQVASHAQKYFLRQKNKKGKRFSIHDMTLGDAENVTVPVSNLNSMGQQPHFDDQSPPDHYQDYFSQSNVTIPGCNMHFMGQQPRFGDQIPPGEYHPYSRDNVTVTGSNLNSIGQQPHFNDQISPDQYGRYLQENFGFFDDDGEDDGSLASFQQLYKA

SEQ ID NO: 27 - DNA, 621 bp, Arabidopsis thaliana
atggcttcgagtccacgctggacggaggacgacaacaggcgttttaagtcagctctgtcgcaattccctccggataacaagcgtttggtgaatgtcgcccagcatctgccgaaacctttggaggaggtgaagtactactacgaaaagttggtcaacgatgtttatctgccgaaacctttagagaatgtcacccagcatctgcagaaacctatggaaatggaggagatgaagtacatgtacgaaaagatggccaacgatgttaatcagatgcccgagtacgtaccactggcggaatcgagtcagtccaaacgcaggaagaaggatacgccaaatccttggacagaagaggaacacagattgtttctgcaaggattgaaaaagtatggggaaggagcttcgacgttgacatcaacgaattttgtgaagacaaagactccacggcaagtgtcaagccatgcacagtattacaaaaggcaaaaatcggacaataagaaggagaaacgccggagtatttttgacataactttggagtctaccgagggcaatccagattctggaaatcagaaccctccggatgatgatgatccgtcccaaggtcaaggcacttgtcttggagtttag

SEQ ID NO: 28 - protein, 206 aa, Arabidopsis thaliana
MASSPRWTEDDNRRFKSALSQFPPDNKRLVNVAQHLPKPLEEVKYYYEKLVNDVYLPKPLENVTQHLQKPMEMEEMKYMYEKMANDVNQMPEYVPLAESSQSKRRKKDTPNPWTEEEHRLFLQGLKKYGEGASTLTSTNFVKTKTPRQVSSHAQYYKRQKSDNKKEKRRSIFDITLESTEGNPDSGNQNPPDDDDPSQGQGTCLGV

SEQ ID NO: 29 - DNA, 1164 bp, Arabidopsis thaliana
atgactcgtcggtgttcgcattgtagcaacaatgggcacaattcacgcacgtgtccaacgcgtggtggtggcacgtgcggtggaagtggcggaggaggaggaggtggtggtggaggagggtctggttcctcctccgccatgaagttatttggtgtgaggttaacggatggctcgattattaaaaagagtgcgagtatgggtaatctctcggcattggctgttgcggcggcggcggcaacgcaccaccgtttatctccgtcgtctcctctggcgacgtcaaatcttaatgattcgccgttatcggatcatgcccgatactctaatttgcatcataatgaagggtatttatctgatgatcctgctcatggttctgggtctagtcaccgtcgtggtgagaggaagagaggtgttccttggactgaagaggaacatagactattcttagtcggtcttcagaaactcgggaaaggagattggcgcggtatttcgagaaactatgtaacgtcaagaactcctacacaagtggctagtcatgctcaaaagtattttattcgacatactagttcaagccgcaggaaaagacggtctagcctcttcgacatggttacagatgagatggtaaccgattcatcgccaacacaggaagagcagaccttaaacggttcctctccaagcaaggaacctgaaaagaaaagctaccttccttcacttgagctctcactcaataataccacagaagctgaagaggtcgtagccacggcgccacgacaggaaaaatctcaagaagctatagaaccatcaaatggtgtttcaccaatgctagtcccgggtggcttctttcctccttgttttccagtgacttacacgatttggctccctgcgtcacttcacggaacagaacatgccttaaacgctgagacttcttctcagcagcatcaggtcctaaaaccaaaacctggatttgctaaagaacgtgtgaacatggacgagttggtcggtatgtctcagcttagcataggaatggcgacaagacacgaaaccgaaacttccccttccccgctatctttgagactagagccctcaaggccatcagcgtttcactcgaatggctcggttaatggtgcagatttgagtaaaggcaacagcgcgattcaggctatctaa

SEQ ID NO: 30 - protein, 387 aa, Arabidopsis thaliana
MTRRCSHCSNNGHNSRTCPTRGGGTCGGSGGGGGGGGGGGSGSSSAMKLFGVRLTDGSIIKKSASMGNLSALAVAAAAATHHRLSPSSPLATSNLNDSPLSDHARYSNLHHNEGYLSDDPAHGSGSSHRRGERKRGVPWTEEEHRLFLVGLQKLGKGDWRGISRNYVTSRTPTQVASHAQKYFIRHTSSSRRKRRSSLFDMVTDEMVTDSSPTQEEQTLNGSSPSKEPEKKSYLPSLELSLNNTTEAEEVVATAPRQEKSQEAIEPSNGVSPMLVPGGFFPPCFPVTYTIWLPASLHGTEHALNAETSSQQHQVLKPKPGFAKERVNMDELVGMSQLSIGMATRHETETSPSPLSLRLEPSRPSAFHSNGSVNGADLSKGNSAIQAI

SEQ ID NO: 31 - DNA, 634 bp, Arabidopsis thaliana
atggccgcgtttccgcagtggacaagggtcgatgacaaacgttttgagttagctctgcttcaaatcccggagggttcgccgaattttatagagaatatcgcctattatctccagaaaccggtgaaggaggtggagtactactactgcgcgttggtccatgatattgagcggatcgaatcgggtaagtatgttttgcccaaatacccggaagacgattacgtgaaactgacggaagcaggtgagtctaagggcaatgggaaaaagacgggaattccttggtcagaagaggaacagaggttgtttctggaaggactaaataagtttgggaaaggagactggaagaacatatcgaggtattgtgtgaagtcaaggacctcgacgcaagtggcaagccatgctcagaagtattttgcaaggcaaaagcaggagagtacgaatactaaacgcccgagtattcatgacatgactctgggagttgcggtcaatgtccctggatccaacttggagtctactggccagcaaccacattttggtgatcaaattccttcgaatcaatattatccctcccaggaaaactttcggggttttgatcagcgatggtgatgggtgtatggcaaacttatactacgcttaa

SEQ ID NO: 32 - protein, 200 aa, Arabidopsis thaliana
MAAFPQWTRVDDKRFELALLQIPEGSPNFIENIAYYLQKPVKEVEYYYCALVHDIERIESGKYVLPKYPEDDYVKLTEAGESKGNGKKTGIPWSEEEQRLFLEGLNKFGKGDWKNISRYCVKSRTSTQVASHAQKYFARQKQESTNTKRPSIHDMTLGVAVNVPGSNLESTGQQPHFGDQIPSNQYYPSQENFRGFDQRW

SEQ ID NO: 33 - DNA, 864 bp, Arabidopsis thaliana
atggctatgcaggaacgttgtgagagtttatgttctgatgaacttatatcttcctcagatgccttttacctcaagacaagaaagccttataccatcactaaacaaagagagaaatggacagaagcagagcatgagaagtttgtagaagcattgaaactctatggcagagcttggagacgaatcgaagaacatgttggaacaaaaactgcagttcagattcgaagccatgcgcagaagttctttactaaggttgctcgcgattttggtgttagctctgagtccattgagatcccgcctccaaggccaaagagaaagccgatgcatccttaccctagaaagcttgtgattcctgatgcaaaagagatggtatacgctgaactaaccggatccaagctgattcaggatgaagataaccgatctccaacatcggttttatcagctcatggctcagatggattaggttccattggttcaaattcacctaactcttcttcagctgagttatcatctcacacagaggaatcattgtctctagaagcagagaccaaacagagccttaagctctttggaaaaacttttgtagttggtgattacaactcttcaatgagttgtgatgattctgaagatggcaagaagaagctatactcagaaacacagtctcttcaatgttcttcttctacttcagaagacgctgaaacagaagtggtagtgtcggagttcaaaagaagtgagagatcagctttctctcagttaaaatcgtcggtgactgagatgaacaacatgagagggttcatgccttacaaaaagagagtaaaggtggaagaaaacattgacaatgtaaaattatcatatcctttgtggtga

SEQ ID NO: 34 - protein, 287 aa, Arabidopsis thaliana
MAMQERCESLCSDELISSSDAFYLKTRKPYTITKQREKWTEAEHEKFVEALKLYGRAWRRIEEHVGTKTAVQIRSHAQKFFTKVARDFGVSSESIEIPPPRPKRKPMHPYPRKLVIPDAKEMVYAELTGSKLIQDEDNRSPTSVLSAHGSDGLGSIGSNSPNSSSAELSSHTEESLSLEAETKQSLKLFGKTFVVGDYNSSMSCDDSEDGKKKLYSETQSLQCSSSTSEDAETEVVVSEFKRSERSAFSQLKSSVTEMNNMRGFMPYKKRVKVEENIDNVKLSYPLW

SEQ ID NO: 35 - DNA, 1098 bp, Arabidopsis thaliana
atgactcgtcgatgttctcactgcaatcacaatggccacaactctcggacttgtcccaatcgcggcgtgaagctctttggtgttcggctcaccgaaggttcgatccggaaaagtgcaagtatgggtaatcttagccattacacgggttctggatcgggtgggcatggaaccgggtccaacactccgggttctccgggtgatgtccctgaccatgtcgctggtgatggttacgcttctgaggatttcgttgctggctcttcctctagccgcgagagaaagaaaggaactccatggacagaggaagaacacaggatgttcttattaggtttacagaagctgggtaaaggtgattggagaggtatctcaagaaactatgtgaccactaggacacctacacaagttgctagccatgctcagaagtatttcatcagacaatccaatgtctctcgtcgcaaaagacgttctagtctctttgatatggttcctgatgaggttggagatattcccatggatttgcaagaaccagaggaagataatattcctgtggaaactgaaatgcaaggtgctgactctattcatcagacacttgctcctagctcacttcacgcaccgtcaatcttggaaatcgaagaatgtgaatcaatggactccacaaactctaccaccggggaaccaaccgcaactgccgctgctgcttcttcttcttccagactagaagaaaccacacaactgcaatcacaactgcaaccgcagccgcaactacctggctcattccccatactatatccgacctacttttcaccatattacccgtttccattcccaatatggcctgctggttatgttcctgaaccacccaagaaagaggaaactcatgaaattctcagaccaactgctgtgcactcgaaagctcctatcaatgttgacgagcttcttggtatgtctaagctcagccttgcagagtccaacaaacatggagaatccgatcagtctctttcattgaagctaggtggcgggtcatcttcaagacaatcagcatttcacccgaatcctagctctgatagttcagacatcaaaagcgtgatacacgctttataa

SEQ ID NO: 36 - protein, 365 aa, Arabidopsis thaliana
MTRRCSHCNHNGHNSRTCPNRGVKLFGVRLTEGSIRKSASMGNLSHYTGSGSGGHGTGSNTPGSPGDVPDHVAGDGYASEDFVAGSSSSRERKKGTPWTEEEHRMFLLGLQKLGKGDWRGISRNYVTTRTPTQVASHAQKYFIRQSNVSRRKRRSSLFDMVPDEVGDIPMDLQEPEEDNIPVETEMQGADSIHQTLAPSSLHAPSILEIEECESMDSTNSTTGEPTATAAAASSSSRLEETTQLQSQLQPQPQLPGSFPILYPTYFSPYYPFPFPIWPAGYVPEPPKKEETHEILRPTAVHSKAPINVDELLGMSKLSLAESNKHGESDQSLSLKLGGGSSSRQSAFHPNPSSDSSDIKSVIHAL

SEQ ID NO: 37 - DNA, 702 bp, Arabidopsis thaliana
atgggcagaagatgctcacactgtggaaacgtaggacataactcaagaacatgttcttcttaccaaacaagagtagttaggctctttggtgttcatctagacaccacaagctcttctccgccgcctcctcctcctccctcgattttggccgctgcaataaagaaaagtttcagcatggattgcttgccggcatgttcctcctcttcctcttcctttgctggttatctctccgatggtctcgcccataaaacacctgaccgcaaaaaaggggttccatggacggcggaagagcaccggacgtttctaattggattagaaaagcttggaaaaggagattggagaggaatctctagaaacttcgtcgtcacaaaatccccgacacaagtggcaagtcatgctcaaaaatactttctccggcaaactaccactctccatcacaagagacgccgcaccagcctctttgatatggtttcggccggcaatgttgaagaaaatagtactactaagaggatatgtaatgatcatattgggtcgagctcaaaggttgtttggaaacaaggattactcaatcctcgtcttggatatccagatccgaaagtatcagtatccggctcgggtaactccggtggactcgatcttgagctgaagcttgcgtccattcaatctcctgaatcgaatattagacctattagcgttacgtga

SEQ ID NO: 38 - protein, 233 aa, Arabidopsis thaliana
MGRRCSHCGNVGHNSRTCSSYQTRVVRLFGVHLDTTSSSPPPPPPPSILAAAIKKSFSMDCLPACSSSSSSFAGYLSDGLAHKTPDRKKGVPWTAEEHRTFLIGLEKLGKGDWRGISRNFVVTKSPTQVASHAQKYFLRQTTTLHHKRRRTSLFDMVSAGNVEENSTTKRICNDHIGSSSKVVWKQGLLNPRLGYPDPKVSVSGSGNSGGLDLELKLASIQSPESNIRPISVT

SEQ ID NO: 39 - DNA, 954 bp, Arabidopsis thaliana
atggtgaaggagacggtgacggtggcgaaaacgtgctcacactgtggccataatggccataacgcacggacttgtctcaacggcgttaataaggcaagtgttaaactgttcggcgttaatatatcgtctgatccgattaggccgcctgaggtaacggcgttaaggaagagtcttagtttgggaaaccttgatgctcttctcgctaacgatgaaagtaacggtagcggtgatcctatcgccgccgttgatgataccggttatcattccgatggtcagattcattccaagaagggtaaaactgctcatgagaagaaaaaggggaagccatggacggaagaagaacatcgtaatttcttaatcggtttaaacaaactcggaaaaggagattggagaggcattgcaaagagtttcgtgtcgacaagaacaccaacacaagtcgcaagtcatgctcagaaatattttattaggttaaacgttaacgacaagagaaaaagacgtgctagtctctttgacatctctctcgaagatcagaaggagaaagagaggaactctcaagatgcttcaacaaagactccacctaaacaaccaataaccggaattcaacaaccggtagtacaaggtcatactcaaaccgagatttcgaacaggtttcagaatttatcaatggagtatatgccaatctaccaacccataccaccttactacaactttccacctattatgtaccatccaaattatccaatgtactatgccaaccctcaagtaccggttaggtttgttcatccttctggtatacctgttccaagacatataccgattggtttgcctctgtctcaaccgagtgaagcttctaatatgacaaataaagacggtttggatcttcatatcggtttgcctccacaagctactggagcttctgacttgactggtcatggcgttattcatgtgaaatga

SEQ ID NO: 40 - protein, 317 aa, Arabidopsis thaliana
MVKETVTVAKTCSHCGHNGHNARTCLNGVNKASVKLFGVNISSDPIRPPEVTALRKSLSLGNLDALLANDESNGSGDPIAAVDDTGYHSDGQIHSKKGKTAHEKKKGKPWTEEEHRNFLIGLNKLGKGDWRGIAKSFVSTRTPTQVASHAQKYFIRLNVNDKRKRRASLFDISLEDQKEKERNSQDASTKTPPKQPITGIQQPVVQGHTQTEISNRFQNLSMEYMPIYQPIPPYYNFPPIMYHPNYPMYYANPQVPVRFVHPSGIPVPRHIPIGLPLSQPSEASNMTNKDGLDLHIGLPPQATGASDLTGHGVIHVK

SEQ ID NO: 41 - DNA, 921 bp, Oryza sativa
atggataggaacacgaacaacaacagcaacagcagcagcagcagcgagatgccggggaagaaggccaggaagccgtacaccatcacgaagccacgggagagatggagcgaggaggagcacgagaggttcctcgacgcgctcatcatgtacggccgcgactggaagaagatcgaggagcacgtcggcaccaagaccaccatacagatccgcagccacgcgcagaagtacttcctcaaggtgcagaagatggggctcgccgccgggctgccgccgcagtacccgaggcggaggctcgtcatgcagcagcagcagcagcagagctcgccggcggtgagcagctcggtggcggcgacggcgatcctccacgggcagccgcagtgcttgccgccgcatcacaacgtcgctgttcagagctccatcggttgggagtgtcccggagttcttcctcctgcaaccaatgacatgcagaacttggaatgggcaagtacttcaggcactgcagcctgggggaaccatcacggcctgattgaaccaccagcagcatttgtttcatttcctggtgaaagttcattcatgggggcagcaagtttcagtaatacgagcatggactggactggcaccacaagtgaaatggcaacagccagcattgtgcaggatgaaacgatcgagcttccactatcacctgatgatctgcaatttgcacaagtatacaggttcatcggcgacattttcgatccagactcgccgtgtccagtggaaacacaccttcagaaactgaagagcatggatgatatcatcgtgaagacgatactgttggtgctaagaaatctcgaagacaacctgttatcccctcagtttgagcctattagaaggttgctgtcgacgtatgatccgaaccgaggactgtctggccatttgtag

SEQ ID NO: 42 - protein, 306 aa, Oryza sativa
MDRNTNNNSNSSSSSEMPGKKARKPYTITKPRERWSEEEHERFLDALIMYGRDWKKIEEHVGTKTTIQIRSHAQKYFLKVQKMGLAAGLPPQYPRRRLVMQQQQQQSSPAVSSSVAATAILHGQPQCLPPHHNVAVQSSIGWECPGVLPPATNDMQNLEWASTSGTAAWGNHHGLIEPPAAFVSFPGESSFMGAASFSNTSMDWTGTTSEMATASIVQDETIELPLSPDDLQFAQVYRFIGDIFDPDSPCPVETHLQKLKSMDDIIVKTILLVLRNLEDNLLSPQFEPIRRLLSTYDPNRGLSGHL

SEQ ID NO: 43 - DNA, 1101 bp, Oryza sativa
atgacgaggcggtgctcgcactgcagcaacaacggccacaacgcgcggacctgccccgcccgcggcggcggtggaggcggaggcggggtgaggctgttcggcgtgcggctcacgtcgccgccggaggtggcgatgaagaagagcgcgagcatgagctgcatcgcgtcgtcgctcgggagtggcggtgggtcagggggttcgtcgccggcgggaacgggaaggggaggaggaggagggggagagggcgcggccgggtacgcgtccgacgaccccacgcacgcctcctgctcgacgaatggccgcggcgagcggaagaaaggtacaccttggactgaagaagagcatagaatgtttctaatgggtctgcagaagcttggtaaaggagactggcgtgggatctctcgtaattttgttgtttccaggacaccaactcaggtggctagccatgctcaaaagtacttcattagacagacaaactcatcaagaaggaagaggaggtcaagcttgtttgacatggtcccagaaatgcccatggacgaatccccagtggtcgtagaacagcttatgctccatagtactcaagacgaagccacaagctcaaatcaattgccaatatcacatcttgtgaaacagaaggaacctgagtttgctagacacctgtcggatttgcagctaaggaagcatgaggaatctgagttcacagaaccttcactagcagcactagacttggagatgaaccatgctgcacctttcaagactaaatttgttctgacaatgccaacattctacccggcattaatacctgttccactaactctttggcctccaaatgttgctaatgtgggtgaatcaggcacaaatcatgaaatcctaaagcccactccagtgaatggaaaggaggtgatcaataaggctgatgaggttgttggcatgtccaagcttaccataggtgacggcagctctaactccatagaaccctctgctctttcccttcagcttactggaccgacaaatacaagacaatcagcttttcatgtgaacccaccaatggctggacctgacctaaataagagaaacaacagcccaattcatgcagtttga

SEQ ID NO: 44 - protein, 366 aa, Oryza sativa
MTRRCSHCSNNGHNARTCPARGGGGGGGGVRLFGVRLTSPPEVAMKKSASMSCIASSLGSGGGSGGSSPAGTGRGGGGGGEGAAGYASDDPTHASCSTNGRGERKKGTPWTEEEHRMFLMGLQKLGKGDWRGISRNFVVSRTPTQVASHAQKYFIRQTNSSRRKRRSSLFDMVPEMPMDESPVVVEQLMLHSTQDEATSSNQLPISHLVKQKEPEFARHLSDLQLRKHEESEFTEPSLAALDLEMNHAAPFKTKFVLTMPTFYPALIPVPLTLWPPNVANVGESGTNHEILKPTPVNGKEVINKADEVVGMSKLTIGDGSSNSIEPSALSLQLTGPTNTRQSAFHVNPPMAGPDLNKRNNSPIHAV

SEQ ID NO: 45 - DNA, 933 bp, Oryza sativa
atggccaggaaatgctccagctgcgggaacaatggccacaactccaggacttgcaccggccaaaggagcctgcaggagagtggcggcggttatggcggcggtggcgccggtggcgtgaggttgttcggggtgcagttgcacgtcggcggtgcgcctctgaagaagtgcttcagcatggagtgcctatcgtcgccgtcgccgtcgccgtcgccggcgtactacgccgcggtcgccgccgccgcctccaactcgtcgccgaccgtgtcgtcgtcgtcgtcgctggtgtcggtggaggaggccggcgagaagatggccaacgggtacctctccgatggcctcatggcgagagctcaggagaggaagaagggtgttccatggactgaagaggagcacaggaaattcctggtagggctcgagaagctcgggaaaggcgactggcgcggcatttcccggcacttcgtcacgacaagaacaccgacgcaggtggccagccatgcccagaagtatttcctcaggcagagcagcctcacgcagaagaagagaagatccagcctctttgacgtgattgaggatgcagaaaaggctccgagtgtgaatgaacgtctgaaactgagacacgagacagcctctgtgcctgctgaaatgggattccctgcactgtcactgggtatcagcagcatggcacagccagaagccatgctgctgcctcctccatccttaaccctgacgccaagctgttcatcaccagcagtgagcagcagcagcagcgaacaaccaagaacaatccatccttctctgatggtggcaaagcctcaggtgcaactgcaactccagccacctgatctggagctcaagatctcgactgtccgtcagaacgatcagcccagttcgtcgccgaggacgccttttttggggacaatcagggtcacttga

SEQ ID NO: 46 - protein, 310 aa, Oryza sativa
MARKCSSCGNNGHNSRTCTGQRSLQESGGGYGGGGAGGVRLFGVQLHVGGAPLKKCFSMECLSSPSPSPSPAYYAAVAAAASNSSPTVSSSSSLVSVEEAGEKMANGYLSDGLMARAQERKKGVPWTEEEHRKFLVGLEKLGKGDWRGISRHFVTTRTPTQVASHAQKYFLRQSSLTQKKRRSSLFDVIEDAEKAPSVNERLKLRHETASVPAEMGFPALSLGISSMAQPEAMLLPPPSLTLTPSCSSPAVSSSSSEQPRTIHPSLMVAKPQVQLQLQPPDLELKISTVRQNDQPSSSPRTPFLGTIRVT

SEQ ID NO: 47 - DNA, 906 bp, Oryza sativa
atggcgaggaagtgctcctactgtggcaactacggccacaactcaagaacctgcagcagcagcgccagcgctggacacagggataccaccatgctctgcgacggcggcgacggaggtggcggcagtgggctgaggctgttcggagtgcaggtccatgtcgctgccggcggcggcggtggaggtggaggtggaggtttgccgatgaagaagagctacagcatggactgcctgcagctggcggcggcgggggcggctccgggctcgctcgtgtcgccgtcgtcgtcgtcctcgtcgtcgatgctcctgtcgatcgacgaggggggcttggagagggcgtccaatgggtacctgtctgatggcccccatggcagaattgtccaggagaggaagaaaggagttccgtggagcgaggaggagcaccggctgttcctcgtcgggctcgagaagctgggcaagggcgactggcgaggcatctcccggagctacgtcacgacgaggaccccgacccaggtcgccagccacgcccagaagttcttcctcaggcagagcagcatcggcaagaagaagcgccgctccagcctcttcgacatggtgccgatttgcgagaacggtgcgcgcgtctcggagcagctgagcggcgaaggcgcggcggcggcggcggcggcgtcgacctcactgtcgctgatgaacacgcacgagacctcctcggacagagtggcggcaattgatctgaattccaccgaggaagatgacacggtgggcgcgtcagggaggccgtttttcccggtggttctgatggagcagcagcagcaggcttcccatggacatggtcaccaccaccactgcacgccgctcgacctggagctcggcatgtccgtctcgtcgacgccgtccatcggcacatga

SEQ ID NO: 48 - protein, 301 aa, Oryza sativa
MARKCSYCGNYGHNSRTCSSSASAGHRDTTMLCDGGDGGGGSGLRLFGVQVHVAAGGGGGGGGGGLPMKKSYSMDCLQLAAAGAAPGSLVSPSSSSSSSMLLSIDEGGLERASNGYLSDGPHGRIVQERKKGVPWSEEEHRLFLVGLEKLGKGDWRGISRSYVTTRTPTQVASHAQKFFLRQSSIGKKKRRSSLFDMVPICENGARVSEQLSGEGAAAAAAASTSLSLMNTHETSSDRVAAIDLNSTEEDDTVGASGRPFFPVVLMEQQQQASHGHGHHHHCTPLDLELGMSVSSTPSIGT

SEQ ID NO: 49 - DNA, 831 bp, Oryza sativa
atgcctacagatgatgccacggcgacgggcaacggcgacggcgccgctccccgtccggcagccgccgagccagcggcgccgctgtcgtccgtgtggacgcggcgggacgaaaagctgctggagatgctgctctggcgctggcagctggacccgcactgggaccggctcgccgcggagctcggcggcaagacggcgacgcaggtgttcgaccggtacgtgtgcttggccgacgagctgaggctcgtcatggcggcgccggcggtggacacgccgcccgcgtgggacgtgcaggacgaacgggaggccgctgtggcgccactacccgggttggaggccgacgcggcggccggcgccggagagtcagcggaggtgacggccattggcatcgctgccgccgcttctccgaatgcagctgctacgagcgctccgaccatcggcggcggggtggtattgaaatctagagagctgaaaaatccgcggaagacgaggatggccggcggcgggccaaggaagaaggcggagatgtggaccagggaagagcatagccaattcttgcacgggattagtacgtacgggaaggggaattggaaggcgctggcgagcgagttcgtgaagaccaagagctcgacccagatcgcgagccactaccagaagttctgcatcagggaagagaagaggaggctgagcaagtgcaagcgggcgagcatccacgacatcgtcagcccgacgacgacgacgtccgcgcctgaatctgccggcgccggcccgagtgcaccaccgtgcgcgctgatcgaaagcggtgcgctgattgcaggcgacgatgacgcatga

SEQ ID NO: 50 - protein, 276 aa, Oryza sativa
MPTDDATATGNGDGAAPRPAAAEPAAPLSSVWTRRDEKLLEMLLWRWQLDPHWDRLAAELGGKTATQVFDRYVCLADELRLVMAAPAVDTPPAWDVQDEREAAVAPLPGLEADAAAGAGESAEVTAIGIAAAASPNAAATSAPTIGGGVVLKSRELKNPRKTRMAGGGPRKKAEMWTREEHSQFLHGISTYGKGNWKALASEFVKTKSSTQIASHYQKFCIREEKRRLSKCKRASIHDIVSPTTTTSAPESAGAGPSAPPCALIESGALIAGDDDA

SEQ ID NO: 51 - DNA, 741 bp, Oryza sativa
atggcggcaatggcggcggcggcggcggggacgaagaagaaggcgaggaagccgtacacgatcacgaggccgcgggagaggtggtccgccgaggagcacgagcgcttccttgacgccctgattctgttcggccgtgactggaagaggatcgaagcgttcgtcgccaccaagacggccatccagattcgcagccatgcccagaagcattttctgaaggcccgcaagttcggcctcgccggtgggctcccgccgccgcttcaccctcgccgtgccacgctgctccgggccaacgccgcggcggcggacatgatgccgcccccgtggctgccatcggccggcggcggctccatcggttgctcggcgccaccgtccggcgtgcagcagagcatggccggcaggtcgccggcgtgctactcaactgatgaagcttctttccggccattgattcatagcaatgacaatgactgttcattcatcgagacaccaagctgcatcggatcaggtggcgaatcatggatcggtgatgatgccttcttcatgcaggatgaaacaattcggctcccaatttctccagatgacctgggattcgctcaggtgtacaagttcgtcggcgacatgttcggctccggcgagcggcggccggtggaggctcacctgcggaggctgcagggcatggaccctgccatctcggagacgatcttgctggtgcttaagaatctcgaagctaatctatctgcttaa

SEQ ID NO: 52 - protein, 246 aa, Oryza sativa
MAAMAAAAAGTKKKARKPYTITRPRERWSAEEHERFLDALILFGRDWKRIEAFVATKTAIQIRSHAQKHFLKARKFGLAGGLPPPLHPRRATLLRANAAAADMMPPPWLPSAGGGSIGCSAPPSGVQQSMAGRSPACYSTDEASFRPLIHSNDNDCSFIETPSCIGSGGESWIGDDAFFMQDETIRLPISPDDLGFAQVYKFVGDMFGSGERRPVEAHLRRLQGMDPAISETILLVLKNLEANLSA

SEQ ID NO: 53 - DNA, 864 bp, Oryza sativa
atggctaggaagtgctctagctgtgggaacaatggccacaactccaggacttgcagtggccaaagagttcttgatcacagcatcagcagcagcaacagtggtagtactactgctgctgctgctactgcctgtggtggcttgaggttgtttggggtgcagctgcaggtaggaggaggctcatctcctctgaagaagtgcctcagcatggagtgcttggcatcaccagcatactatggagcttctgcctcgccgtcggtttcgtcgtcgtcatcttcgcttgtttcgattgaggagaacactgagagggtctccaatgggtacctctctgatgggctcatgggaagggttcaggagaggaagaaaggagttccatggactgaggaagaacaccagatgttcctcgccggccttgacaagctcggaaaaggcgactggcggggcatttctcggcacttcgtcactacccggactccaacgcaggtcgccagccatgcccagaagtacttcctgaggcagaacagtatgacacagaagaagaggaggtccagcctctttgatgtggttgaaggtatcaagagggcagcagcaatgcccatttcaggatctgcatctgaactgcagatccccggcatgtcgatcggtgtcggcgtggtgaaggaggaggttgtcctgcctccatgtctgaacctgatgagtaacagttcatcagcatcacagcactcaccttccctgacattgctggcaaatcctcaggtgcagctccagatgcctgacctggagctaaagatgtccacatcccggttatctgaccaatccggtccgtcgccgagcacgcctttcttcgggaccatcagagttacctga

SEQ ID NO: 54 - protein, 287 aa, Oryza sativa
MARKCSSCGNNGHNSRTCSGQRVLDHSISSSNSGSTTAAAATACGGLRLFGVQLQVGGGSSPLKKCLSMECLASPAYYGASASPSVSSSSSSLVSIEENTERVSNGYLSDGLMGRVQERKKGVPWTEEEHQMFLAGLDKLGKGDWRGISRHFVTTRTPTQVASHAQKYFLRQNSMTQKKRRSSLFDVVEGIKRAAAMPISGSASELQIPGMSIGVGVVKEEVVLPPCLNLMSNSSSASQHSPSLTLLANPQVQLQMPDLELKMSTSRLSDQSGPSPSTPFFGTIRVT

SEQ ID NO: 55 - DNA, 813 bp, Oryza sativa
atgcacgccatcatggcgaggcgatgctctggtgactactcgactgcaggccaacgagccggcgaggagggcggcggcggcggcggcgccgggctacggctgttcggggtgcagctccatgctgcggcggccagctcgccggcgtcctacttgcacaagagttacagcatggattgcctgcggctgcaggtttcttctccttcctccttgcagtcgtcgtcgtcgtcgccgtcgccgttgacgtcctcgttgttgctgtccatcgacgagggctgcgagaggccagccgccgacggctacctctccgacgggcctcacggcgcggcggcaaccatgcgggagaggaagaaaggagttccatggagcgagcaagagcacaggctgttcctggcggggctggagaagctgggcaagggcgactggcgaggcatctcccggagcttcgtcaccaccaggacgcccacccaggtcgccagccatgcccagaagttcttcctccgccacaacagcgccgccaagaagaccaacaacaagcgccgctccagcctcttcgacatggttcaggattgtgacagtggaggaagatctctcgcctcatccgatcctgccactcgctgcaacaacaacatctctgcttctctgtctctccaagtttcgcaccacaaatcaggtgacagtgcgtggccttcgtcagaaacaccatcagtttcagaagcacaacaaggtcatggatacggcactagtcaccattgctctccgctggacctggagctgggcatgtccctgtccaccacgccatccatcggaacctag

SEQ ID NO: 56 - protein, 270 aa, Oryza sativa
MHAIMARRCSGDYSTAGQRAGEEGGGGGGAGLRLFGVQLHAAAASSPASYLHKSYSMDCLRLQVSSPSSLQSSSSSPSPLTSSLLLSIDEGCERPAADGYLSDGPHGAAATMRERKKGVPWSEQEHRLFLAGLEKLGKGDWRGISRSFVTTRTPTQVASHAQKFFLRHNSAAKKTNNKRRSSLFDMVQDCDSGGRSLASSDPATRCNNNISASLSLQVSHHKSGDSAWPSSETPSVSEAQQGHGYGTSHHCSPLDLELGMSLSTTPSIGT

SEQ ID NO: 57 - DNA, 966 bp, Oryza sativa
atgggttcaatagtcattgaggggtggacggcatctgagatagaggaggctaggtcactgatcactagccccaacaacggtggcgaaggtggtgatggagaggggaacaagcagaagcattgcggacacatcgtgatggaactccatgaatggttcccttggaagaccataggccaggtaataggtttgtatatgaagctcaatgcggggaaacccatggttatgcatagcttgaataagagtgatgccaacaatagcatcggtgaggttgatcatgtgagtgccctcgcaaacggtaaccctgtgaggctagaggaacatcgacccatgttgaacaatgtgggcttagtgtttgattatccattggaagagatggagatggaaaatcaaacagatcaagagccgaagatggttgtagaggaggaggtgcagcctaaggagggattagtgatcaaggagaaagaggcgggggtgtcaaagattcacactaatagtcaacatgtgacgccatcaataaaaagaagggtgatttggacagaggaagaacacaggctgttcatggtggggctgcgcgtgttcgggcgcggcgactggaagaacatctccaagcaccttgtcaccaccaggacggcggcgcaggtctccagccacgcgcagaagttcttcctcaagatggaggcccgcggcgaggccgtccccccgccggccaagaggcgccgccgccgcatcaccggcgaccagcaggcggcggccgccgagcacgctgccgccctcaggcgccgcatgccagtgccaccgcctccgttcaaccccttcctcctgcccagcctcgtcgcgccggtgatgcaccgcctcctcccacctgggagccaggctgccggcgccgccgcctccggcagcggcggccagggagcttctcttcctcagatgccatggatcaacggcgccaatggcatggggcgctag

SEQ ID NO: 58 - protein, 321 aa, Oryza sativa
MGSIVIEGWTASEIEEARSLITSPNNGGEGGDGEGNKQKHCGHIVMELHEWFPWKTIGQVIGLYMKLNAGKPMVMHSLNKSDANNSIGEVDHVSALANGNPVRLEEHRPMLNNVGLVFDYPLEEMEMENQTDQEPKMVVEEEVQPKEGLVIKEKEAGVSKIHTNSQHVTPSIKRRVIWTEEEHRLFMVGLRVFGRGDWKNISKHLVTTRTAAQVSSHAQKFFLKMEARGEAVPPPAKRRRRRITGDQQAAAAEHAAALRRRMPVPPPPFNPFLLPSLVAPVMHRLLPPGSQAAGAAASGSGGQGASLPQMPWINGANGMGR

SEQ ID NO: 59 - DNA, 1185 bp, Oryza sativa
atggagtggacggcggcggagatggacgaggcgaggtcgatcatcgctaggctgaccaacgcttacgactccggcaccctcgttgccggcgccggcaacggcgacacgaggcacgaccgcattgtgagggagctgcaggcgtggctcccatggaggaccatggatcagctaatcgggctgtacattgagctcatggcggaggagcccgcggcggcgcagccgcagtacttcgacgccggcgccgtcgtcgaccctacgttcgacttcttcaacgaccacaacaacttcctcggcatgccgccgccgccggttcaacaagctgatgaccataacatgaacaacgtcgtcgccgacgccggcatgaactactactatggcggcggcggcgccggcggtgccatggtgtttggtggtgcacccatgggggagacggtggagcaggcagctccgccggtgccggtggtgccggtggtgatgaaccgcgacgacgacgaggtgaacaaccagggcggcggccgtcaccgtgctgcaccaacaaatactactaggaggttttggaccactgaagagcacaggcagtttctgagggggctgcgtgtgtacggacgtggtgagtggaagagcatctccatgaacttcgtcagaagcaagacgccggtgcaggtgtccagccacgcccagaagtacttccgccgcgtggagagcgccgccgccgacaagcagcgctacagcatcaacgacgtcggcctcaacgacgacaccgccgccatggacggcaccaacagctacagcaacaataacttcggtggctggcagagtctcgccttcgccggcggccacctcgagcccgtcagcggcggcggcgccgccaggcaagtcatcgctccggcgagctcctccgccgctgccatgaacagcgccgctcagttctgggctcctatgctgttcaacccccagattcagcagcagttcatgcagatgcaggcgcagacgcagcaggcgtggaatgatcagcatatgatgatggctgctgctccaatggagggagcaactgatactaactttgagcctgcaggtgcagttaattattattattatcaacagcagcaggaggaggaggagggaggtgcttatggtgttcctgcggatcagtggatgatgaaccagaacaacaacatgtgctga

SEQ ID NO: 60 - protein, 394 aa, Oryza sativa
MEWTAAEMDEARSIIARLTNAYDSGTLVAGAGNGDTRHDRIVRELQAWLPWRTMDQLIGLYIELMAEEPAAAQPQYFDAGAVVDPTFDFFNDHNNFLGMPPPPVQQADDHNMNNVVADAGMNYYYGGGGAGGAMVFGGAPMGETVEQAAPPVPVVPVVMNRDDDEVNNQGGGRHRAAPTNTTRRFWTTEEHRQFLRGLRVYGRGEWKSISMNFVRSKTPVQVSSHAQKYFRRVESAAADKQRYSINDVGLNDDTAAMDGTNSYSNNNFGGWQSLAFAGGHLEPVSGGGAARQVIAPASSSAAAMNSAAQFWAPMLFNPQIQQQFMQMQAQTQQAWNDQHMMMAAAPMEGATDTNFEPAGAVNYYYYQQQQEEEEGGAYGVPADQWMMNQNNNMC

SEQ ID NO: 61 - DNA, 897 bp, Oryza sativa
atggagtggacggcggcagagctggcggaggcaaggtcggtcatcgctagggtcagcgacgcctacaactccggcgtaggcagcagcagcagcgcctgcgacaccaagcacgaccgcattatgagggagctccaggcgaggttcccgtcgaggaccatggtccaggtaatcgatctgtacgttaatctcacggtggagacggcggcgcagccgcaggacgccggcagcgccggcgacgccgccgccgtcgtccaccctacttttgccggcggcatgcccgttgtgaacaacaacgacggcatggtgcatggtggtgctgctatggaggtgggggcggtggcggtgaacggcggggacggtgaggtggtgaacccggacaatgctgatgacgatgtgctttggactgattatgagcacaggctgtttctgactgggatgcgtgtgtacgggcgtggcgactggagaaacatctcgaggtacttcgtcagaagcaagacgccggagcagatctccatgtacgccgacaactacttccacatgatggagatcgccgcggccatggaagccgacggcggcgacgacgacgacggccaccatgaaatcaataacaacaacaacaacttgggcggcggccagctgcacgccgtcgtcggcgccgtcgggcacggccccggtgccgggcacattgctccggcgaccccctccaacaacaacaccgccgccgccgccgtgaacaacaacgtcgacacaccgttctgggttccgctgctgtacaaccccgagatagagcagcggatgatggagatgcaggcgcagtcgcagaaggcctgggatgatcagcagatgaagatggctgaagctgcaactccaaaggaggagggagcagctgataagtga

SEQ ID NO: 62 - protein, 298 aa, Oryza sativa
MEWTAAELAEARSVIARVSDAYNSGVGSSSSACDTKHDRIMRELQARFPSRTMVQVIDLYVNLTVETAAQPQDAGSAGDAAAVVHPTFAGGMPVVNNNDGMVHGGAAMEVGAVAVNGGDGEVVNPDNADDDVLWTDYEHRLFLTGMRVYGRGDWRNISRYFVRSKTPEQISMYADNYFHMMEIAAAMEADGGDDDDGHHEINNNNNNLGGGQLHAVVGAVGHGPGAGHIAPATPSNNNTAAAAVNNNVDTPFWVPLLYNPEIEQRMMEMQAQSQKAWDDQQMKMAEAATPKEEGAADK

SEQ ID NO: 63 - DNA, 1089 bp, Oryza sativa
atgctgctctctcattgttttgcagtagcattcgctctctctgcgctgctcgccggcctcgccctcgccatggacgacgcaacgttcggcatggagtggacggcggcggagctgggtgaggcgaggtcggtcatcgctagggtcagcaacgcctacgactccggcgccggcagcagcaacagtgccggcgacaccaagcacgaccgcattatgagggagctccaggcgaggttcccgtcgaggaccatggtccaggtaatcgacttgtaccttaatctcacggcggagacagcagcgcaggcgggggcggcccagccgcaggacgccggcggcgccggcgacgccgccgtcgtccaccctacctttggcctcgcgaacgacaacttcggcatgcccgttgcgaacaacaacgacgacggcgtcgacgccggcatggtgtttggtggagctcctatggaggagggggcggtggcggtgaacggtggggacggtgaggtggtgaacccggacaatgctgatgacgatgtgctttggaccgattatgagcacaggctgttcctgactgggatgcgtgtgtacgggcgtggcgactggagaaacatcgcgaggtacttcgtcggaagcaagacgccggagcaggtctccatgtacgccgataactacttccacatgatggagatcgccgcggccatggaagccgacggcgacgacgatgacgaccaccatgaaaacaataacaacaacttgggcggcgggcagctgcacgccgtcgtcggcgccgtcgagcaccatgaaaattacaacaacaacaacttaggcggcgggcagctgaacgccggcctcggcgccgtcgggcacggccccggtgccgggcacattgctccggcgacctcctccaacaacaacgtcgccgccgccgccgcgaacaacaacgtcgacgcaccgttctgggttccgctgctgtacaacctcgagatagagcagcgcatgatggagatgcaggcgcagtcgcagaaggcctgggatgatcagcagatgaagatggctgaagctgcaactgatccaaaggagggagcagctgataagtga

SEQ ID NO: 64 - protein, 362 aa, Oryza sativa
MLLSHCFAVAFALSALLAGLALAMDDATFGMEWTAAELGEARSVIARVSNAYDSGAGSSNSAGDTKHDRIMRELQARFPSRTMVQVIDLYLNLTAETAAQAGAAQPQDAGGAGDAAVVHPTFGLANDNFGMPVANNNDDGVDAGMVFGGAPMEEGAVAVNGGDGEVVNPDNADDDVLWTDYEHRLFLTGMRVYGRGDWRNIARYFVGSKTPEQVSMYADNYFHMMEIAAAMEADGDDDDDHHENNNNNLGGGQLHAVVGAVEHHENYNNNNLGGGQLNAGLGAVGHGPGAGHIAPATSSNNNVAAAAANNNVDAPFWVPLLYNLEIEQRMMEMQAQSQKAWDDQQMKMAEAATDPKEGAADK

SEQ ID NO: 65 - DNA, 501 bp, Oryza sativa
atgtccatggatacatctcctgtcatcagaaatacaaatgccagtgctgtagtaccctcctgggacaattctattgctcaacctttaagtgcaagtcgcacgcaaggtacaggtgctgttgctacaaataactgctctagtagcatagagagtccttctactacttggccaacttctgaagcagttgaacaagaaaatatgcttcgaccactacgtgctatgccagattttgcacaagtatacagctttctgggaagcatatttgatccagatactagtgggcatttgcagactttaaaggcgatggatccaattgatgttgaaacggtactactgctgatgagaaatctgtccatgaacttaactagccccaactttgcggcacatctgagcttgctgtcatcatgtaattctggtggggacccaattaagtctgaaggcatggaaaatcttggatctccacagagttgccatctcccgttcatggtaacaagtgagtga

SEQ ID NO: 66 - protein, 166 aa, Oryza sativa
MSMDTSPVIRNTNASAVVPSWDNSIAQPLSASRTQGTGAVATNNCSSSIESPSTTWPTSEAVEQENMLRPLRAMPDFAQVYSFLGSIFDPDTSGHLQTLKAMDPIDVETVLLLMRNLSMNLTSPNFAAHLSLLSSCNSGGDPIKSEGMENLGSPQSCHLPFMVTSE

SEQ ID NO: 67 - DNA, 1152 bp, Oryza sativa
atgacgcgtgacggcgcgctgccggcgagcggcggcggcggggcggcggaggggccgaggcggtgctcgcagtgcgggcaccacgggcacaacgcgcggacgtgcacggcgaggggccccgtgaagctgttcggcgtgcggatcggcgacaagccgccgaccgcggccgcgggcggaggaggagggatgaggaagagcgccagtatggggagcctcgcgcagctggcggaggggggcggcggcggcggcgggagggaggaggggtacggctccgatgggaacgacgacaaacggcggaagcgaggtgaggcatggtcagaagaggagcacaaaaagtttctacttgggcttagtaagttaggaaaaggtgattggcgcggcatatcacgcaattatgttggttcaaggacgcctactcaagttgctagccatgctcaaaagtacttcattcgccaaacaaatgtgcacaggagaaaaagaagatcaagccttttcgatatggttatagatgattctgatgaccaaccactgtcccgtacatcttcacaagaagtagaagtagaagagaatctagaagatggacatcctgttactgcaccagtgatcccacctgctcctgtgcctatgctatcatcctctttggttccgccaccagtaccagcaatggcaccagttgctccaggtcctgtgttaacatctgcttcggccacactaccagtgtcagcagtggcaccccaaaccgatgaaaaggaacaagttgcctcaggttcaaatacaacagagacaggggctgcaattccagaagtcatgcccccatatggttatccaatgatgcttcctccatactacccaccggcatttgttccaatgccctactatggttatgtgcctgttttctatgcaccaccaggagcagtgcaagcacaacatgaggttgtcaagcctgtggccgtgcactcaaaacctccagtgcacatcgatgaactctacagcatgtccgaactcagcctgaagggcgaggctggtgtgaaaaacggcactcctaattctctgttgcctccaagaccaattggtagaccagacaggcaatctgcttttcatggaaaaggaccttctgatggctcttcaaatggactgattcctgcaaagtga

SEQ ID NO: 68 - protein, 383 aa, Oryza sativa
MTRDGALPASGGGGAAEGPRRCSQCGHHGHNARTCTARGPVKLFGVRIGDKPPTAAAGGGGGMRKSASMGSLAQLAEGGGGGGGREEGYGSDGNDDKRRKRGEAWSEEEHKKFLLGLSKLGKGDWRGISRNYVGSRTPTQVASHAQKYFIRQTNVHRRKRRSSLFDMVIDDSDDQPLSRTSSQEVEVEENLEDGHPVTAPVIPPAPVPMLSSSLVPPPVPAMAPVAPGPVLTSASATLPVSAVAPQTDEKEQVASGSNTTETGAAIPEVMPPYGYPMMLPPYYPPAFVPMPYYGYVPVFYAPPGAVQAQHEVVKPVAVHSKPPVHIDELYSMSELSLKGEAGVKNGTPNSLLPPRPIGRPDRQSAFHGKGPSDGSSNGLIPAK

SEQ ID NO: 69 - DNA, 1020 bp, Oryza sativa
atgcctcaagattcgcgccccgccgcgatgcgcctcttcggcgtcaccatctcgccgccgccgccgccgccggagccggagccggagccggatccgtccgacccccgggatccgagcccgcggccggcgagggaggacgcgatgcgcaagtgcaagagcatgggcaacctcgccgccgccgccgccgcctcctccgccgcagccggcggcggcggcgccggggacgccgggggatcgggcgacgggtacctctccgacggtgggctgctgctgtcctccggcaagcggcggcgcgcgcaggagaggaagaaagctgtcccttggactgaagaagagcaccgaacatttcttgctggtcttgaaaagctaggaaagggggactggaggggtatatctaagaactttgttactaccaggactccaactcaagtggctagtcatgctcagaaatattttcttagacaaactaatccaaacaagaagaagcgcagatcaagcctttttgatatgatggcaactgatatgtcaccagcaccaaactgccctgtcttgccaccatcaatgggaaaattacatgatatggtagctatgactaaacaactccagaacagcagtttggaaggagtctcatcttcaagcacagttaatctagcaccacaagttgcaagagatcttcctcccccaattccatcttttaaagcaacaaatgtagattcaagtctcagcaaaatgaaccacatggacggtttcttgagggcgcccatgctgttcagaccaattccaagaatcgctgaaggggcatcttcatcgactcctgcaactgcaagcatagctgatctggaatttcaagctaacctgactgcatgttctaatgcattattcgcgagtccgagaagaaagccaaagaaggcagatcctccagcagagaaggatctggatctgacagttgccccaccctcccaacaaaccagggccagtatttcttcccagaacgcagtaggcgtaattcaagtcgtatag

SEQ ID NO: 70 - protein, 339 aa, Oryza sativa
MPQDSRPAAMRLFGVTISPPPPPPEPEPEPDPSDPRDPSPRPAREDAMRKCKSMGNLAAAAAASSAAAGGGGAGDAGGSGDGYLSDGGLLLSSGKRRRAQERKKAVPWTEEEHRTFLAGLEKLGKGDWRGISKNFVTTRTPTQVASHAQKYFLRQTNPNKKKRRSSLFDMMATDMSPAPNCPVLPPSMGKLHDMVAMTKQLQNSSLEGVSSSSTVNLAPQVARDLPPPIPSFKATNVDSSLSKMNHMDGFLRAPMLFRPIPRIAEGASSSTPATASIADLEFQANLTACSNALFASPRRKPKKADPPAEKDLDLTVAPPSQQTRASISSQNAVGVIQVV

SEQ ID NO: 71 - DNA, 2160 bp, Oryza sativa
atggagattaattcctctggtgaggaagcggtggtaaaggtgaggaagccatacacaatcacaaagcagagggagcgttggactgaggcagagcacaacaggttccttgaagccttgaaactgtatgggagagcctggcagcgcatagaagagcatgttgggacaaagacagctgtgcagatcagaagtcatgctcaaaagttcttcaccaagttggaaaaggaagctatcaacaatggcacttctccaggacaagctcatgacatcgacatacctccaccacgaccaaaaagaaaacctaacagtccatatcctcgaaaaagttgtctcagctctgagacatccaccagggaagttcaaaatgataaggcaacaatatcaaatatgacgaacaatagcactgcacaaatggcaggtgatgcagctcttgagaaacttcaaagaaaggagatatctgaaaaaggaagttgctccgaagttcttaatctctttcgagaagtcccatcggcatcattttcttcagttaacaaaagctcttcaaatcatggtgcatccagggggctggaaccgactaaaacagaagtcaaagatgtggtcatcttggaaagggattctatttccaatggtgcagggaaggatgcaaaagatatcaatgatcaagaaatggaaaggctcaatgggatacacatcagctcgaagcctgatcattctcatgaaaactgtttggatacctcaagccaacaatttaagccaaaatcaaactctgtggagacaacatatgtggattggtctgctgcaaaagcttcacactaccaaatggacagaaatggggttactggctttcaagccactggaactgaaggaagccatcctgatcaaacaagtgatcaaatgggaggagccagcggaactatgaatcaatgcatccatccaacacttcctgtggatccaaaattcgacggcaatgccgcagcacagccctttcctcacaactatgcagcctttgcaccaatgatgcaatgccactgcaaccaagatgcctacagatcttttgccaatatgtcatccaccttctccagcatgcttgtctccacattgttgtcaaaccctgcaatccatgcagctgccaggcttgcagcatcgtactggcctacagtagacggcaatactcctgatccaaatcaagaaaatctttctgagagtgctcaaggaagccacgctggctctcctcccaacatggcatctattgtcacagctacagttgctgcagcatcagcatggtgggcaacacaaggtcttctccctctttttcctccacctatagcttttccatttgttccagctcctagtgctcccttttccacagcagatgttcagcgagctcaagagaaagatatagactgcccaatggataatgcacagaaggaattgcaagaaactcggaaacaagataattttgaagctatgaaggtcatagtgtcttcagagactgatgagagtggaaaaggagaagtgtcgctccacactgagttaaagatatctccagcagataaggccgacaccaaacctgccgcaggagctgaaacaagtgacgtttttggaaataagaaaaagcaggatcgctcttcatgtggttccaacacaccgtcaagtagtgatatagaagcagataatgctcctgagaatcaagaaaaggctaacgacaaggcaaagcaagcatcttgcagtaactcttcagccggtgacaataaccaccgtagatttaggagcagtgcaagcacaagtgattcatggaaggaagtttctgaagagggtcgtctggcttttgatgcactgttcagtagagaaaggcttccccaaagcttttctcctccgcaagtagaaggatcaaaggagattagcaaggaggaagaagatgaagtaaccacggtgacggttgacctcaacaagaatgccgctattattgatcaagaactcgacacagcggatgagccaagagcttcctttcctaatgaattgtcaaacctgaagctgaaatctcgcaggaccggtttcaaaccatacaagaggtgctcagtggaagcgaaggagaacagggtaccggctagcgatgaggttggtaccaagaggattcgtcttgagagcgaagcatcgacatga

SEQ ID NO: 72 - protein, 719 aa, Oryza sativa
MEINSSGEEAVVKVRKPYTITKQRERWTEAEHNRFLEALKLYGRAWQRIEEHVGTKTAVQIRSHAQKFFTKLEKEAINNGTSPGQAHDIDIPPPRPKRKPNSPYPRKSCLSSETSTREVQNDKATISNMTNNSTAQMAGDAALEKLQRKEISEKGSCSEVLNLFREVPSASFSSVNKSSSNHGASRGLEPTKTEVKDVVILERDSISNGAGKDAKDINDQEMERLNGIHISSKPDHSHENCLDTSSQQFKPKSNSVETTYVDWSAAKASHYQMDRNGVTGFQATGTEGSHPDQTSDQMGGASGTMNQCIHPTLPVDPKFDGNAAAQPFPHNYAAFAPMMQCHCNQDAYRSFANMSSTFSSMLVSTLLSNPAIHAAARLAASYWPTVDGNTPDPNQENLSESAQGSHAGSPPNMASIVTATVAAASAWWATQGLLPLFPPPIAFPFVPAPSAPFSTADVQRAQEKDIDCPMDNAQKELQETRKQDNFEAMKVIVSSETDESGKGEVSLHTELKISPADKADTKPAAGAETSDVFGNKKKQDRSSCGSNTPSSSDIEADNAPENQEKANDKAKQASCSNSSAGDNNHRRFRSSASTSDSWKEVSEEGRLAFDALFSRERLPQSFSPPQVEGSKEISKEEEDEVTTVTVDLNKNAAIIDQELDTADEPRASFPNELSNLKLKSRRTGFKPYKRCSVEAKENRVPASDEVGTKRIRLESEAST

SEQ ID NO: 73 - DNA, 957 bp, Oryza sativa
atgacgaggcggtgctcgcactgcagccacaacgggcacaactcgcggacgtgccccaaccgcggggtcaagatcttcggggtgcgcctcaccgatggctccatccgcaagagcgccagcatggggaacctctccctcctctcctccgccgccggatccaccagcggcggcgcctcccccgccgacggccccgacgccgcccccaccgccgccgacggctacgcctccgacgacttcgtccagggctcctcctccgccacccgcgaccgcaagaagggtgttccttggactgaagaagaacaccggaggtttttgcttggattgcaaaagcttggcaaaggtgattggcgaggaatctctcgtaatttcgtggtctcaagaacacctactcaagtagccagtcatgctcagaaatattttatacgccaatccaatatgaccagaaggaaaagaaggtctagcctttttgacatggtgccagatgagtctatggaccttccaccacttcctggaggtcaagaaccagagacccaagtattaaatcaaccagcactacctccaccgagggaggaggaggaggtagattctatggagtcagatacttctgccgttgcagagagctcttccgcttctgctatcatgccagataatttgcagtcgacctatccagtgattgttccagcttatttctcgccctttttgcaattctcggttcctttctggcaaaatcagaaagatgaagatggtcctgtgcaagaaacacatgagattgtcaagcctgttccagttcattcaaagagcccaatcaacgttgatgagcttgttggcatgtcgaagctcagcataggagagtccaatcaagagacagtgtctacttctctttcattaaatctggtaggaggtcaaaatagacaatcagctttccatgcaaatccaccaacaagggcacaggcatga

SEQ ID NO: 74 - protein, 318 aa, Oryza sativa
MTRRCSHCSHNGHNSRTCPNRGVKIFGVRLTDGSIRKSASMGNLSLLSSAAGSTSGGASPADGPDAAPTAADGYASDDFVQGSSSATRDRKKGVPWTEEEHRRFLLGLQKLGKGDWRGISRNFVVSRTPTQVASHAQKYFIRQSNMTRRKRRSSLFDMVPDESMDLPPLPGGQEPETQVLNQPALPPPREEEEVDSMESDTSAVAESSSASAIMPDNLQSTYPVIVPAYFSPFLQFSVPFWQNQKDEDGPVQETHEIVKPVPVHSKSPINVDELVGMSKLSIGESNQETVSTSLSLNLVGGQNRQSAFHANPPTRAQA

SEQ ID NO: 75 - DNA, 798 bp, Oryza sativa
atggagcagcatgaggaggcagcggagaggaagccttcgccgccggtgatattccggctgttcggcgtcgaggtccgcggcggcggcggcggagttgacgaggaggagtacgaggaggaggaggtggagggtggattgttcatcaagaagagctccagtatgcccaacctcacctccatcgacccgctgccggtgccggccgacggcggcaaacggcgcgcctccgacgactccgagctcgcctccggccagcagaagcgccgccgccgcaaggtgcaggagaggaagaaaggggtaccatggactgaggaggagcacaagaaattcctggaagggctgaggcagctggggaaaggggactggagaggcatctccaagaactttgtgaccagcaggacggcgactcaggtggccagccacgcccagaagtacttcctccggcagaccaaccctggcaaaaagaagcgccgggccagcctctttgatgttgttgctgagtgcagtgatgatcagcttccaagtcctcagagtgttggaactaagcctcctacccaggatataattcatacagatcgcggcgatgtcccgatactaagctatccagttgctagaggctttagaggcgatagcgtgcaggttgatgaactaactgaatatgtgaagagattaaaggccgccgaggacatgtcgctctccatgatctctggactggaaatggcatcatcatccatcagcagtctagagctcagtatcgcgcctcctcattgcgcgatcgaggcggccatcaaggtgctgtga

SEQ ID NO: 76 - protein, 265 aa, Oryza sativa
MEQHEEAAERKPSPPVIFRLFGVEVRGGGGGVDEEEYEEEEVEGGLFIKKSSSMPNLTSIDPLPVPADGGKRRASDDSELASGQQKRRRRKVQERKKGVPWTEEEHKKFLEGLRQLGKGDWRGISKNFVTSRTATQVASHAQKYFLRQTNPGKKKRRASLFDVVAECSDDQLPSPQSVGTKPPTQDIIHTDRGDVPILSYPVARGFRGDSVQVDELTEYVKRLKAAEDMSLSMISGLEMASSSISSLELSIAPPHCAIEAAIKVL

SEQ ID NO: 77 - DNA, 1476 bp, Oryza sativa
atggagatggcctgtttgccgggaaacgccatggcaaccgacgaaaacggtgccgacgatcgcgccggcggcgagagcaccgtggatcatctcaggagccatatgaactacggcgacatggatttgtcaggggaagagcacgtgccaaaggcgcgaaagccgtacacgatcacgaagcagcgcgagaagtggacggacgaggagcacaggctgttcttggaagccctgcagctgcacggccgcgcatggcgccgtatacaagagcacataggtaccaagactgccgtgcaaatccgtagccacgcgcagaagttcttctctaaggtcgtcagagaatcttcggggagtaacaccggctcgggcggcgcgtccgccgcggcggcggcggcggccatccagatccctccgccgcggccgaagaggaagccggcgcacccgtacccgcgcaaggtggacggcgcggccaagaagcacgtcccggcgctcaggcagctggagaagccgccgttgtggatgcagtccctgtccgagcaggaggagggctcgccgacgtcggtgctgacggcggcgcagataggcaccgaggccctgggcggtgggttctcgaataactcgagcggcagcgggtcgctggctccgtcagccgccggtacggatgagcatgtcgacggtggcggctcgccggcgtcgtcggtggacagagaggacgggtgcctctcaccgagcatcccgactgctgagttggctatgcaggcgccaaatactaagatgtcaattgcaaccacggatgccaaagaagcatcctcagaagcatcagtcttcaggctattcggaaagagcgtagtggttaaggattcagaccagctgcacctgcttaatggcagtaacattgcaacgagtggttcagttgagagagcaaccagaaacatactagtaccttcttttgctgctgccccagaagggagctcgtcgaatccatggccgagcagcatgcaacagtttctctacttccttcctcgatcggatggtttcgccgcgcaacctgtcatgccatggttgagctacaacgggagccttccatgcgcgctgttctacccggcggcggcggcggctgcgaaccagcagtgccaccgtgattcagagggcgtagagttcagagtctcgcagagggaaggatcgctgacgggctcgaacacggcctccagcgtcgtgcttggatcgtcggcggcggtaccggcggcggcggcggcggctcagaattcggacgtcgcggagtcccgtggccaagggaacagcagggaggcggcggcctcgccacggctgaccaagtgcgagagctcggcgtccgtcaccctgctgcagaggggcttcatgccgtacaagaggtgcgcggcggagagcgagctgctgcgatcggaggccgccggaggagaggaggccgtcgccgacggtgagctgacaaggctgtgcttgtga

SEQ ID NO: 78 - protein, 491 aa, Oryza sativa
MEMACLPGNAMATDENGADDRAGGESTVDHLRSHMNYGDMDLSGEEHVPKARKPYTITKQREKWTDEEHRLFLEALQLHGRAWRRIQEHIGTKTAVQIRSHAQKFFSKVVRESSGSNTGSGGASAAAAAAAIQIPPPRPKRKPAHPYPRKVDGAAKKHVPALRQLEKPPLWMQSLSEQEEGSPTSVLTAAQIGTEALGGGFSNNSSGSGSLAPSAAGTDEHVDGGGSPASSVDREDGCLSPSIPTAELAMQAPNTKMSIATTDAKEASSEASVFRLFGKSVVVKDSDQLHLLNGSNIATSGSVERATRNILVPSFAAAPEGSSSNPWPSSMQQFLYFLPRSDGFAAQPVMPWLSYNGSLPCALFYPAAAAAANQQCHRDSEGVEFRVSQREGSLTGSNTASSVVLGSSAAVPAAAAAAQNSDVAESRGQGNSREAAASPRLTKCESSASVTLLQRGFMPYKRCAAESELLRSEAAGGEEAVADGELTRLCL

SEQ ID NO: 79 - DNA, 1392 bp, Oryza sativa
atggcgcgttttcaggaaaccaaggcgaggaatgatcaaggacctgttgctgatcatgttgggcaccaaaacctcatggaaaacctcacagatcctctggattccagtggcatggacatgatggacgaagcgcgaattcctaaggcgcggaagccatacacgataacgaagcaaagggagaaatggaccgaggacgaacataagctgttcttggaagccctgcagctccatggccgagcctggcgacgcatccaagagcacataggcaccaagactgccgtgcagatcaggagccacgcacagaagttcttctccaaggtcatcaaagaatcatctggggacaattgcaacagcttgggtgctgcatcatcaattcagattcccccgccgcggccgaagcgtaagcctgttcatccgtacccacgcaatctagggagcacagccagcaagaacgtccctgcactgaaacagctagagaagcctcagctgcaggtgcagtctctctacgaccaggacaatgggtcgccgacgtcagtgttaacagtaccacagatacgggctgatacactgggaagtgagagtggtgggtcgccaacctcgacgattgatattgaagagagatgtcctacaccaagcatagcaactgctgagttagctatggagttgcctcctacaaatgacgaggaggtcaagggcaatggcgatcatgaagaagttacatgtgacagatcaggagttccagtccttaggctatttggcaagagggttatggtgaatgatttacatcagatgtcagcccctgatgccgggaacctgcaaactgtggcagacatggaagtggacgcttcagctgagacaccaactagtggaactgggaaattctcttcccatggtgcagcagaagcaaatacatggaacccatggctgactaacacacagcagtttctgtattatcttcctaacggacaaattttctccgtgcattctgctctcccatgcttcacctaccataatgagggtgttacttgcacccagttttcaaacccacaggtggtagcctcagatcaacagcatcaacaccaaacttctgaagctgtagattacaagggtatacagagggaaggatcttggacggagtcaaatacatcctcaagcagtgtgcctgaaacagcaactcataattcagagactacagaatcatatagaaacggaaacagaaacgaagatgaaatggtaccttctccagattcaagaaaatgtgtgagcccaggttccaactgcaggcgaggctttgtgccgtacaagagatgtgttgctgatagtgaggcgctgctgaagtcacaggcgcctcaggaggaggcagacggagagatgacgaggctgtgcttataa

SEQ ID NO: 80 - protein, 463 aa, Oryza sativa
MARFQETKARNDQGPVADHVGHQNLMENLTDPLDSSGMDMMDEARIPKARKPYTITKQREKWTEDEHKLFLEALQLHGRAWRRIQEHIGTKTAVQIRSHAQKFFSKVIKESSGDNCNSLGAASSIQIPPPRPKRKPVHPYPRNLGSTASKNVPALKQLEKPQLQVQSLYDQDNGSPTSVLTVPQIRADTLGSESGGSPTSTIDIEERCPTPSIATAELAMELPPTNDEEVKGNGDHEEVTCDRSGVPVLRLFGKRVMVNDLHQMSAPDAGNLQTVADMEVDASAETPTSGTGKFSSHGAAEANTWNPWLTNTQQFLYYLPNGQIFSVHSALPCFTYHNEGVTCTQFSNPQVVASDQQHQHQTSEAVDYKGIQREGSWTESNTSSSSVPETATHNSETTESYRNGNRNEDEMVPSPDSRKCVSPGSNCRRGFVPYKRCVADSEALLKSQAPQEEADGEMTRLCL

SEQ ID NO: 81 - DNA, 1356 bp, Oryza sativa
atggcttccatgccgcagctggaggaaaaggattcatccgatttggcaatcaacaaaggcccgtcgctggatcttgtcaaatctcccttgatgatgaatgatgcatctgcaactgtaactgcaatgcagcccaacgaggggatggaggagttccctgtcaaggttcggaagccttacacgatcaccaagcagcgggagaagtggacggaagaagagcacgacaagttccttgaggcattgaagctgtatggtcgctcttggcgtcagatacaagagcacattggcacaaagactgctgtccaaattcggagccatgcccagaagtttttctcaaaggtggtgcgtgagcccggttccaataatgcgattgagatccctccacctaggccaaagagaaaaccacttcatccgtaccctcgaaagtgtgcgaattctggatcggacgcaaatccagcaacagcgcaattgaagcttgctcctggctcatcttcatctggctctgatcaagagaatggttctcctatatcggtgctatctgcgatgcagtcagatgcttttggatcgtcagtatccaatccatcaaccagatgtacctccccagcgtcatctgacgatggaaataacattcccacattcacgagtggggaagataataatgtgccttgtgaaccaacagtgatagatccgtcccagtcccacaaggaaatagaccaagatagaaaagacgtgaataatatgtctgaagaggattcttcagaagaagaggtgcaagaaacaagcttgaagctatttgggaggacagttgtcatcccagatccaaggaagagaagctcctcagatccgaagcatgaaagtgaggagcagatatcacagccttccaatgaagaaatgttgcaggcttcttcatcggttggggagattccagcggcatattgtgcaccaaatggttggtttatgtcatacaattctttcccattccaattcggtgaatcagcggcagatgctagaattccccctttacacgtgtggtggccttactacggttttgctcccattagccatcctagaggactaagcacagtgatgcagcagactgaaggtagtgacgagagtgacggtgtgaagagccactcatccgaatcaagttcggactccggggaaaatgtgcagatgaccgctccccagagctcgagaatagtggaatcacttggagcgatttacgtccgagactcaggttcaagttttgagctaaaaccgagcgcaaattcagcgtttgtaagagtgaagccaagcaacagcggagatgaagaggtaataaggggatttgtgccttataaaagatgcaaatttcaataa

SEQ ID NO: 82 - protein, 451 aa, Oryza sativa
MASMPQLEEKDSSDLAINKGPSLDLVKSPLMMNDASATVTAMQPNEGMEEFPVKVRKPYTITKQREKWTEEEHDKFLEALKLYGRSWRQIQEHIGTKTAVQIRSHAQKFFSKVVREPGSNNAIEIPPPRPKRKPLHPYPRKCANSGSDANPATAQLKLAPGSSSSGSDQENGSPISVLSAMQSDAFGSSVSNPSTRCTSPASSDDGNNIPTFTSGEDNNVPCEPTVIDPSQSHKEIDQDRKDVNNMSEEDSSEEEVQETSLKLFGRTVVIPDPRKRSSSDPKHESEEQISQPSNEEMLQASSSVGEIPAAYCAPNGWFMSYNSFPFQFGESAADARIPPLHVWWPYYGFAPISHPRGLSTVMQQTEGSDESDGVKSHSSESSSDSGENVQMTAPQSSRIVESLGAIYVRDSGSSFELKPSANSAFVRVKPSNSGDEEVIRGFVPYKRCKFQ

SEQ ID NO: 83 - DNA, 2338 bp, Lemna paucicostata
  misc_feature (2259)..(2259): n is a, c, g, or t
  misc_feature (2308)..(2308): n is a, c, g, or t
ctaatacgactcactatagggcaagcagtggtatcaacgcagagtacgcgggcggaaaagatcgtggctgagatttatccacttcgaagaactagagagagaaagagggagctcaagcgagcttaagtctgcggcggaggagagattcctttcttttctccgctttttccttcctcttagagctggagatctgttgccacggcttaaatctcgatccgagcggttttagccgcggaaattgcggtttgattgggcagggagatgagaaagaagagaagaagagcggagaagagatgattatcggtttttggcgccggatttagatatatgttatatcgagtacagttgtattaattcctgttaagtgatccaattaagtagaattactggattctttaatcgctatggtttcctttagtttcttggttcatcccagattatttgatgctaagccaatttgcagttattatttgaattctgtgagaaattttcacggcgaatcgaaatggagagaagatgcaggctcgaagaggattgctcgaagtgaactgctccgtcttttttgctatttgttactgcacattgcagtaatggaaacatgttcttccggagaggaattggtcataaagccaaggaaaccctacaccataaccaaacagagagagaagtggaccgaggaggaacacaacagattcctggaagccttgaagctctatggaagagcatggcagcgaatcgaagagcacattggaacaaagactgctgtgcagattagaagtcatgcacagaagttcttcactaagttagaaaaagaagccgtctccaaaggcgttcccctcggccaagtccacgacatcgacatccctcctccccgccccaagcggaaacccaacaacccttaccctcgtaagctcggtgtgggtcccacctgcccttctggctcggagagagaagataacaagacgttgactcaccttccttctctgaactccaaggggaaagccgaagattcccccgagtcgtcccacgagaaccaagctggaataaagccagataagaaaaccccggagagtccagtcattctctctctcttccacgtggcgccacctccttccaccccttcctccagcaaatccccggtgtcttccttgggtaagggaatggcagaagaaaacaaccctaaaatctgccacgttgaccgagtcaaccccaaactcccatccccgtcagcaatctcctcggtccaccaatcccatcccttctcctggccccacatcccgcccgcattctccacacatctgacgtcagccctagttcaaaaccctgcagctcatgcagctgctaacttggcagcgtcttattggttgagtgctgacgtggaagccgcctcctcagtagactccgccagctctgcgtctcccaccatggccgccgcagctgccgccaccgtggctgccgcctccgcctggtgggccacccaagggttgctccccttctgctatccttcgttcaacggctgcttcgccgctttcgcgccgccgccgactcccatcacgttgactgagtcaacgggagtcaaggttaaccctaatgtagaagaacaagaggaacagggccgttcaaaggggtcgcctttatcgtccacggactcaaaccctagcgagaagagagaagtcaacggcgagggggaggtcaaagtccaaggtcaaagcttgacccaacgagaggaaaagtcaaccctagaggggaagaatcagttggaccggtcttcctccgggtcaaacacacctggaagcgaagtggagaatgaaggtgtggagcccacagaggatgaaatgcccaaagaggaggctgttgaccctactcgccgcggagttgacccccgaaaagaagtctccaaagagggccgcctcgccttccaagcgctcttctcccgggaagttctaccgcagagcttctcccccaccgagacagaagaccaaaaggaacaaaagtcaacggaagtcaaccctcacccggaagtcaaccccgttgaccgaatccccgcagagctaagtcaacacaggctcaagcctcactgcacaggattcaagccttacaagaggtgctcggtggaggccaaacagacggagccgccgccagaagaagataaatgtagtaagagaatatgtctggagagagaggcctccatttgacttggtcaacgcttcgaccaagtctttctctctcttaccctttacctgtcaaactttggaaccncctttttttttcttctcatattctttccccaggggactgccatgattcncggtaaaaaaaaaaaaaaaaaaaaaaaaaa

SEQ ID NO: 84 - protein, 534 aa, Lemna paucicostata
METCSSGEELVIKPRKPYTITKQREKWTEEEHNRFLEALKLYGRAWQRIEEHIGTKTAVQIRSHAQKFFTKLEKEAVSKGVPLGQVHDIDIPPPRPKRKPNNPYPRKLGVGPTCPSGSEREDNKTLTHLPSLNSKGKAEDSPESSHENQAGIKPDKKTPESPVILSLFHVAPPPSTPSSSKSPVSSLGKGMAEENNPKICHVDRVNPKLPSPSAISSVHQSHPFSWPHIPPAFSTHLTSALVQNPAAHAAANLAASYWLSADVEAASSVDSASSASPTMAAAAAATVAAASAWWATQGLLPFCYPSFNGCFAAFAPPPTPITLTESTGVKVNPNVEEQEEQGRSKGSPLSSTDSNPSEKREVNGEGEVKVQGQSLTQREEKSTLEGKNQLDRSSSGSNTPGSEVENEGVEPTEDEMPKEEAVDPTRRGVDPRKEVSKEGRLAFQALFSREVLPQSFSPTETEDQKEQKSTEVNPHPEVNPVDRIPAELSQHRLKPHCTGFKPYKRCSVEAKQTEPPPEEDKCSKRICLEREASI

SEQ ID NO: 85 - DNA, 2379 bp, Lemna gibba
  misc_feature (2202)..(2202): n is a, c, g, or t
  misc_feature (2224)..(2224): n is a, c, g, or t
  misc_feature (2226)..(2226): n is a, c, g, or t
  misc_feature (2228)..(2228): n is a, c, g, or t
  misc_feature (2240)..(2240): n is a, c, g, or t
  misc_feature (2248)..(2248): n is a, c, g, or t
  misc_feature (2250)..(2250): n is a, c, g, or t
  misc_feature (2255)..(2255): n is a, c, g, or t
  misc_feature (2259)..(2259): n is a, c, g, or t
  misc_feature (2262)..(2262): n is a, c, g, or t
  misc_feature (2274)..(2274): n is a, c, g, or t
  misc_feature (2280)..(2280): n is a, c, g, or t
  misc_feature (2287)..(2288): n is a, c, g, or t
  misc_feature (2302)..(2302): n is a, c, g, or t
  misc_feature (2313)..(2313): n is a, c, g, or t
  misc_feature (2318)..(2318): n is a, c, g, or t
  misc_feature (2320)..(2320): n is a, c, g, or t
  misc_feature (2323)..(2323): n is a, c, g, or t
  misc_feature (2325)..(2325): n is a, c, g, or t
  misc_feature (2329)..(2329): n is a, c, g, or t
  misc_feature (2331)..(2331): n is a, c, g, or t
  misc_feature (2333)..(2333): n is a, c, g, or t
  misc_feature (2335)..(2335): n is a, c, g, or t
  misc_feature (2337)..(2337): n is a, c, g, or t
  misc_feature (2342)..(2343): n is a, c, g, or t
  misc_feature (2349)..(2349): n is a, c, g, or t
  misc_feature (2352)..(2352): n is a, c, g, or t
  misc_feature (2359)..(2359): n is a, c, g, or t
ctaatacgactcactatagggcaagcagtggtatcaacgcagagtacgcgggggaggaagaggaggaagcgagccttctccgagctcgatttcagcggcttccggagcctggattactctcttttcttcgctttttcctcgctctgagcactggagatcagttcaactaggtcagctctcaatctgaccagttttcccgaagaaattgggagattggggaagccaggcgatgagaaagaagaggagaagagggaattagagaagcgccttgatttttgctgtcagagttagttcaacggagttgtgaatttgattctccagttattcgtcagtccgatcgaagtcatggatagaagatgcgccctcgttggggaatatacgaattgagcctctccgtgttttttgctctttttttctgcgaattgcagttatggagacatgttcctccggagaggaattgatcgtgaagccaaggaaaccgtacacgattacgaaacagcgagagaagtggaccgaggaagaacacaacagattcctcgaagccttgaagctatacggaagagcctggcagcgaatagaagagcatattggcacaaagaccgctgtacaaataagaagtcatgcacaaaagttcttcactaagttagaaaaagaagcagtatctaaaggcgttcctctgggtcaagtccatgatattgagatccctcctccgcgccctaaacgaaaaccgaccaatccctatcctcgaaagatcggtgtgggcccctcctacccatctggaggagagagagatgataacagacaattaacgcaccttccttcttcttctttacattccaagggcaaagccgaagattttttcgtcgattcttctcccgagaagcaagcaggaatgaactcggagaaaattaccaaagaggccccagttgccctctctctcttccacgtggcgccttcttctcccaccccttcctcgagcaaatccaccgttcctttaccagatgacgaaaaaaacccaagcatcaattttgacttgaacaagaagaaccgcccttgcggagtcaacgcagaccctaatacagtcaaatttccatccccatcggccatctcctcggtccaccaatccactgctgcctttcctcatccattcagttggccccacgtcccgccggctttctccagccacctgacgtcagccctacttcagaatccggcggcgcatgcggccgccaacatggccgcgtctttctggttgactgctgacgtggagacttcttcctccgttgactccgggaatgccgccagctcgtcttcccctagtgtggcggcggcggcgattgccaccgtggcggcggcgtcagcttggtgggccacccatggactcctccctttctgctacccttcattcaacggctgcttcgccgccgttcctccgcctccgacgaccaccccgacgctgaccgaggcgacccgagtcaaagtcaaccctcgcaacggcaaagaggaagaggaaaaggatctccgtcaaggtttcgacccgggcacgtcgttgaccgcgaagggctcacctctctcgtcaacagattccaacccgagtgagaaaagagaggtcaacggcgagggggaggtcaatgtccacggtcaaccacagaaccagcagaagtccacgccggatgaggaatcttttaggagaaagggaaagaaccagttagaccgttcttcctccggatccaacactccgggcagcgaagtggacaacgatggcgcggggcccacagaggaagaaaagcccaaagacgacgacctctccgttgaccctaaccgccgaggagttgacccccgcaaggaagtctccaaagaggggcgcctcgcctttcaagcgctcttctcaagaggagtgctgccgcagagcttctcccccacagagggagaggcggagaaagatgaagtgttagcgcccgcctcggctccctcagaagtcaacgcccttcaacctccccaagtcaactccgttgaccaaacctctgtagatatcggtcaactgaggccgaagcctcactgcatagggttcaagccctacaagcgttgctcagtggaggcaaaggagaccgagcccccgccggaggacgacaaatgtagcaagagaatgtgtttggagagagaggcgtcgacttgagccggtcacgctgtctcggtctccantggttttcgacgagtcaacggngnancttggcatatcnttttcccngnggaantttngantgcctttttctncgaatntctttcnngggggaactgccgnaatccggggtnaattntnttntnggcngngncntnggaannaatttnccnttctctnccaaaaaaaaaaaaaaaaaa

SEQ ID NO: 86 - protein, 581 aa, Lemna gibba
METCSSGEELIVKPRKPYTITKQREKWTEEEHNRFLEALKLYGRAWQRIEEHIGTKTAVQIRSHAQKFFTKLEKEAVSKGVPLGQVHDIEIPPPRPKRKPTNPYPRKIGVGPSYPSGGERDDNRQLTHLPSSSLHSKGKAEDFFVDSSPEKQAGMNSEKITKEAPVALSLFHVAPSSPTPSSSKSTVPLPDDEKNPSINFDLNKKNRPCGVNADPNTVKFPSPSAISSVHQSTAAFPHPFSWPHVPPAFSSHLTSALLQNPAAHAAANMAASFWLTADVETSSSVDSGNAASSSSPSVAAAAIATVAAASAWWATHGLLPFCYPSFNGCFAAVPPPPTTTPTLTEATRVKVNPRNGKEEEEKDLRQGFDPGTSLTAKGSPLSSTDSNPSEKREVNGEGEVNVHGQPQNQQKSTPDEESFRRKGKNQLDRSSSGSNTPGSEVDNDGAGPTEEEKPKDDDLSVDPNRRGVDPRKEVSKEGRLAFQALFSRGVLPQSFSPTEGEAEKDEVLAPASAPSEVNALQPPQVNSVDQTSVDIGQLRPKPHCIGFKPYKRCSVEAKETEPPPEDDKCSKRMCLEREAST

SEQ ID NO: 87 - DNA, 2570 bp, Castanea sativa
gcgtgttttcgcatcaatttttgcgctgtagtgaggatttgaagcagccctgctggctgctccgcgtccggtaatggacacatactcctctggggaagaactggttattaaggctagaaaaccatatacaataactaagcaacgggagagatggacggaggacgagcataataggtttctagaagccttgaagctctatggacgagcatggcagcggatagaagaacatataggaacaaagactgctgtgcagatcagaagtcatgcacagaaattcttttcaaagttggagaaggaggctcttgttaaaggtgttccaataggccaagctcttgacatagatattccacctccacgccctaaaaggaaaccaagcaatccttatcctcgaaagacaagcatcggcgttcctacatcacaggtgggaacgaaggatggaaaacttttcacatcagcttcttcttcggattgcaaacaagcactggacttggagaaagaaccacttcctgagaaacctaatggagatgagaaaccagaaaatgcaaaagataatcaggatgacaattgctcagaagtctttacccttcaccaagaagttcattgttcttctgtttcttcagcaaacaggagttctgtaccgactcccgttgctctcagaaatttaaacacgttaagggagtttgtcccttcaatgaaaaggtcaataacccaagatgaaacaaatgaatcttatgtcactattgaacttaaaggaaatcagaagttggagaaagctgatgccaaacagacaattcaagatactggcacaagtaatggctcaaagttggggaatcataatgttctacatgagaagccaattcaaggtgacaagacacaggatttaaattgtgctttgccaatggatgagatgcaagccactcagaactacccaaggcatgtccctgtgcaagttgtagatggaagcttaggaacatgtactcaaactccttcctcagatatgtcattccaggactccatatttcacccaatgggagaggttcacagacaccataatccctttacaaatccagcagcatctgctaccactgaacatcaaaataatgttcccagatctgttaatcaatcatttccggctttccatcctccctttaccccaattcgccataaccaggacgactaccaatcatttctccacatgtcctccacattttcaagccttattgtctctactttgatgcaaaatcctgcagcccatgctgcagcaagttttgcagctacagtttggccctatgcaaatgtggaggcttctgcagattctcctgcaagcacgcaaggggtttttccaccgaggcaaatgggctctactccaagtatggcagctattgctgctgctactgtagctgctgcaactgcatggtgggcagcccatggactggttcccttatgtgctcctcttcctactgcttttacctgcaatcctgcatctacagctgcagttccaccaacagattctggccaagcccctgcagccaagacagagggagaagtgaatactcttcaaactcctcccttgcaacaactcgacccagaatattcagaagctgttcaagctcagcattcagactcaaaattgccaattccgtcatcatcagactctgaggagagtggaggtgcaaagctaaactctgggccaaaagctactgatcatgagaatgctgtaacagctactgagctccatgattcaaacaaaacaaaaggcagaaaacaggttgaccgttcctcatgtggttccaacacagcttctagcagtgacagggagacagatgcattagagaagcaggagatggggaaggaagagccgaaagaacctgatgcaaaccattcagctgctgatactagtaatcgtcgttgttgtagtagtagtagtagaagtttcagctacatgaatgattcctggaagtcagtctctgaagagggccggctggcctttcaagcactgttctctagagaggtactgcctcaaagtttttcacctccacatgatctgaagaacatggggaatcaaaaggacaataccacagacgataagcaaaatgcaaatgagaatgatggaaatgcatcactgttagacctcaacagtcaaaaatctgggtcttgttctgtccaacaaggaatcttaaactttgaacccaacaacaatggggaggggctgctgacaatagggcttgcatatggaaagcttaaggctcgtcgaacgggatttaagccatacaaaaggtgttcagtagaggccaaggagaatagggtggcaaatgctagtggccaaggtgaagagaagggtccaaagaggatacgcttggaaggggaggcttcaatttgagatttgatattgcattcaatcaaaggaaacctttgttgtgcatatcttattttccccgtaactatgttctaatctctttcatttcaagtccatctcacgaaacttgtcgtgcatgtgtgtgtactatattatgtctacatttgctcatatactatgttgaaccccaggcaactgcactagaagactttcc

SEQ ID NO: 88 - protein, 768 aa, Castanea sativa
MDTYSSGEELVIKARKPYTITKQRERWTEDEHNRFLEALKLYGRAWQRIEEHIGTKTAVQIRSHAQKFFSKLEKEALVKGVPIGQALDIDIPPPRPKRKPSNPYPRKTSIGVPTSQVGTKDGKLFTSASSSDCKQALDLEKEPLPEKPNGDEKPENAKDNQDDNCSEVFTLHQEVHCSSVSSANRSSVPTPVALRNLNTLREFVPSMKRSITQDETNESYVTIELKGNQKLEKADAKQTIQDTGTSNGSKLGNHNVLHEKPIQGDKTQDLNCALPMDEMQATQNYPRHVPVQVVDGSLGTCTQTPSSDMSFQDSIFHPMGEVHRHHNPFTNPAASATTEHQNNVPRSVNQSFPAFHPPFTPIRHNQDDYQSFLHMSSTFSSLIVSTLMQNPAAHAAASFAATVWPYANVEASADSPASTQGVFPPRQMGSTPSMAAIAAATVAAATAWWAAHGLVPLCAPLPTAFTCNPASTAAVPPTDSGQAPAAKTEGEVNTLQTPPLQQLDPEYSEAVQAQHSDSKLPIPSSSDSEESGGAKLNSGPKATDHENAVTATELHDSNKTKGRKQVDRSSCGSNTASSSDRETDALEKQEMGKEEPKEPDANHSAADTSNRRCCSSSSRSFSYMNDSWKSVSEEGRLAFQALFSREVLPQSFSPPHDLKNMGNQKDNTTDDKQNANENDGNASLLDLNSQKSGSCSVQQGILNFEPNNNGEGLLTIGLAYGKLKARRTGFKPYKRCSVEAKENRVANASGQGEEKGPKRIRLEGEASI

SEQ ID NO: 89 - DNA, 2172 bp, Phaseolus vulgaris
atggacgcatactcctctggagaagaagtcgttgtaaagacgagaaaaccgtatacgatcacaaagcaaagggaacgatggacagaggaggagcataataggtttctagaagctttgaaactgcacgggcgagcatggcagcgcatagaagagcatataggaacaaagactgccgtgcaaatcaggagtcacgcacagaagttctttacaaagttggagaaagaggcccttgtaaagggtgttccaattggacaagctcttgacatagatattccccctccacggcccaaaagaaaaccaagcaatccttatcctcggaagaccacgattggtaccgcaacattacatagtggagcaaaggatggaaatttggttgaatcttcacataacaaccaagcactggacttggaaaaagaaccacttccggagaaatatgatttagacgaggggctaacaacagtaaaggaaaataaggatgagaactgctcaaaagtatttaaagttatccaggaggtaccctgttcctctatatcttcagcaaacaggagttcaatatctatgtcagtgccgctgggaaattcatgcgtattaaaggagattacaagttcagtgaaagaggtaataactcgagatgaaaatactgaatcatttctgactgttgaacttggaaacaggaatttggagatcaatgatggaaaacaggctaatggcactagtaaaaactccacgttggagaattctgatgctttacaaacgaaattggttcaaaatgagaaaacagatggtctcgatagtgcattaacaatagatgggatgcaaggcaatcagaattaccctagacatgtaactgtgcacgttgttgacgggaaacttggaacaagtactcaaaatccatcacaagatatgctgtttcgagactctatgtttcagccaataggaggggataatgggcaaccaaatcttttcaccaattcagctccaacgaacacaagtgaaagtcaaaataatacagcacgatcttctgttcatcaatcatttcttccgtatcctcccttcacacagcacaatcaggacgattaccaatcatttcttcacatgtcttccacgttttctaatcttgttgtctctaccttgctgcaaaacccagcagcccatgttgcagcaagtttcgcagctacattttggccttatgcaaatccagaaacttcagcagattctcctaggtgctcccaaggaggtttcacatctagacaaatcggttcccctccaagcgttgcagctattgcagcagctactgtagctgctgcaactgcgtggtgggcagctcatggattgcttcctttgtgtcttcctcttcatgctgcttttgcctgtcctcctgcatcagtgactgcagtcccatcaatgaatcctcctgtgcaagatcagaagcatccagaatactcggaagcaccgcaagctcaacattcagattcaaagtcactagctgtcatttcatcagattctgagactggaaatgccaagttaaatacttcaccaaaggctactgatcatgtgacgaacgaaacaatttctgagcaccttgattccgacaaaacaaagggcagaaaacaggttgaccgttcctcgtgtggttccaacacagcctcaagcagcgatgtggaaactgatgcactagggaaggatgagaaagggaaggaagagcctgaaacacccgacgctaacaatttagccattgagtttagtaatcgtcgtagaagcatttacaaccttactgattcttggaaagaggtctcttcagaggggagactagcatttcaggctctattctccagagaggtgttgcctcaaagcttttcacctcctcatgctctaaagaataaggaccaaatggacatcaccaatgattacaagcaaaacatagccgacagaaatgaagaccttgacagcaagaaatgcagttctaatgcactgcataaaattccgtcgtttgtagaaaataacgtgggactgttaaccattgggcttggacaaggaaagcttaagactcgtcgaacaggctttaaaccctacaaaagatgttccgtggaggccagggaaaatagggttggagcgaactgtgaagagaaaggttgtaagagaatacgtttggaaggggatacttcgacttga

SEQ ID NO: 90 - protein, 723 aa, Phaseolus vulgaris
MDAYSSGEEVVVKTRKPYTITKQRERWTEEEHNRFLEALKLHGRAWQRIEEHIGTKTAVQIRSHAQKFFTKLEKEALVKGVPIGQALDIDIPPPRPKRKPSNPYPRKTTIGTATLHSGAKDGNLVESSHNNQALDLEKEPLPEKYDLDEGLTTVKENKDENCSKVFKVIQEVPCSSISSANRSSISMSVPLGNSCVLKEITSSVKEVITRDENTESFLTVELGNRNLEINDGKQANGTSKNSTLENSDALQTKLVQNEKTDGLDSALTIDGMQGNQNYPRHVTVHVVDGKLGTSTQNPSQDMLFRDSMFQPIGGDNGQPNLFTNSAPTNTSESQNNTARSSVHQSFLPYPPFTQHNQDDYQSFLHMSSTFSNLVVSTLLQNPAAHVAASFAATFWPYANPETSADSPRCSQGGFTSRQIGSPPSVAAIAAATVAAATAWWAAHGLLPLCLPLHAAFACPPASVTAVPSMNPPVQDQKHPEYSEAPQAQHSDSKSLAVISSDSETGNAKLNTSPKATDHVTNETISEHLDSDKTKGRKQVDRSSCGSNTASSSDVETDALGKDEKGKEEPETPDANNLAIEFSNRRRSIYNLTDSWKEVSSEGRLAFQALFSREVLPQSFSPPHALKNKDQMDITNDYKQNIADRNEDLDSKKCSSNALHKIPSFVENNVGLLTIGLGQGKLKTRRTGFKPYKRCSVEARENRVGANCEEKGCKRIRLEGDTST

SEQ ID NO: 91 - DNA, 1036 bp, Glycine max
gtttcttcctccgatccctcattgccgcaaatgactcctcctgctagtgttaggtgaattccctcgcttcacatgcatgatcgcaccttcaactctcttcttcttcttcttctccatggctttttttcaaggttttggcgccgtggagttcgttttggtgaggattctgattaaagagttttcttttattctttcggagaagcgtctctgtctctctgttgcggtggattcttaaaatttgctaaatctttttttttctttttctaatctctattagtatcatcctgcgtgtggcttgtgattggaatgcttagatttatattttttgttaccaaacagagacggatctctacctttctatttcttttgcagtagcatcaccgtatcatcagcttcagcttgctttcaccaaaacggctttactatttggtgtgttccatgtcacaaaaaacgaaaggagatattccttttacccactcctcgtcagggaagatctgaagcagcgctagcagcacacgtcctctaatggacgccgactcctctggagaagaagtggttattaaaacaagaaaaccatatactatcacaaagcaaagagaacgatggacagaggaggaacataacagatttctagaagccttgaagctatacgggcgagcatggcagcgcatagaagagcatataggaacaaagactgctgtacaaatcaggagtcatgctcagaaattctttacaaagttggagaaagaggcctttgtaaagggtgttccaataggacaagctcttgatatagacatcccccctccacggccaaaaagaaaaccaaacaatccttatccccggaagaccaatgttggtggtgccccaacattacatagcggagcaaggcatggaaagcctctcatttcaattgtatcttcacttggtaaacaagcattgggcttggagaaagaaccccttccagagaagcatgatgtcgacctaaggccatcaaccgtaaaagaaaataaggaccaaagctgctcaaaagtattta

SEQ ID NO: 92 - protein, 170 aa, Glycine max
MDADSSGEEVVIKTRKPYTITKQRERWTEEEHNRFLEALKLYGRAWQRIEEHIGTKTAVQIRSHAQKFFTKLEKEAFVKGVPIGQALDIDIPPPRPKRKPNNPYPRKTNVGGAPTLHSGARHGKPLISIVSSLGKQALGLEKEPLPEKHDVDLRPSTVKENKDQSCSKVF

SEQ ID NO: 93 - DNA, 3051 bp, Mesembryanthemum crystallinum
gggggtgtggcgcattttctctctcctcgcgctcgagttcaaacactcctgttcttcttcaattcctttttagtgttttttttgagaggtttaatcaatatactagaaattcggcaatcaaatggggtgagtttattctgtcaatcatttgtatgatcatttagtggattgagcgttcgattgattgtttctcgtcttctcgatctgctatggcatcttcagaaggtgtgagcacgttctcgactgtttcggtgaggattctgaacaaggaaatttttaccgctttctagagctggatggattgtcaatttgatttgggaaacatgggggaagaaagggagtcttttcatttttatgacgattagttaggtttcagtatatgaaaattttattatttttgttttggaaatggttgtttaaattgatagtattatttgggcgacaaaaaagacaggatctctatcgattttagttttcttggtttgctacttgtttgtatttctgcagtagtgattttactcaccagatttcaacgagtgtatgttcagtactactctctgatgtgtggagggataagaggccgcttttgtataccttgcttgttggagagcagctgaaagcagtggtagcggtagctccggctaccgctatggaggcttattcttccggagaagagctagttattaagacaagaaaaccttatacgatcaccaagcaacgagagcgatggacagaagaggagcataataggtttttagaggccttgaaactctatggacgagcttggcagcggatagaagagcatattggaacaaagaccgctgtccagatccgaagtcatgcacagaagttcttttcaaagttggaaaaggaggctcttgttaaaggtgttccaatacagcaagcaatcgacatagaaattcctcctccacgacctaagaggaaaccgagcaatccttatcctcgcaagactggagctgcaggttctccaagtacacagatcaaagttaaggatgggaacaaagtaccaccaggttcttcacatactgcaaaccagttactagacttggaaaaagaacctccaccagagaacactactggtgatgatgggaagcaaaatgctaaagaaacctgtggtgcttacaaatgctcagaaacctttactctgttccaagaagcaccatccaccttgacagcatccggtaatgaaaactctgccataacaacgggtgcaacgagaaagtcatgcaaggttgatgaccctgtgccaaagaaactgttggtcgatattgacggaagtgattgtcctgctgctgatggacgacagagaaatcaaaaactagataaaactgatactgtggagactgctcagaatgacacagaaaacgaaatgcatgctgttaagaactttcctagacatactcctgttcatattcttgatggaagcctaggagcatgcagtcaagctctttcctcagacgtatcatatcaagaatctgcatttcatcggatgggaatcccaggctatcctgcaatttttagcaatcctgcagtatcagctgctgtggaaagtcaaaatagcacatcaagaaccactaatcaacaaatgtttacaagcttccatcctccatttactccattccctaacaccccagaagactattcatcatttgtgcagatgtctgctaccttttcaagtctgattgtgtctgctcttcttcaaaacccagctgcacatgctgcagcaagttttgctgcttccttttggccttgctctaatatggaaaattcagccaattgtcctgctggtctaagtggcggattcccaccacggccaatgaatacggctccaagcatggcagcaattgctggagccacagtagcagctgctactgcttggtgggcagcacatggtctcttgcccttatgtgctcctgtacattctggcttcaattgtcctcctgcctctgctaatgccccattaactaatgttgcccaaagtcaagccactaataaggaaagagaggagaacaatttccaaaatcctggttcacaagttcagcaacctgatcaggaactctctgaagctttgcagccacagcattcagcatccaaaccttcagcaacatcgtcatctgattctggtgacagtgcaggtgcaaagatggaaattgaaataccaaccaatgataatgagataaaggtccctgcaatgactgagcaaaaggactcaagcaagggcaagagcaagaaactggtggaccgctcttcttgtggttccaacacaccctcaggtagtgatgttgagactgatgctttgcagaagaatgataaaggcaaggaagaacccctagaacctgatattagtcaaattgctggtgaacttaataatcgtcgcaatcgaattgcaagcaacaacttaaatgacagctggaaggaggtttccgaggggggacgccttgcgtttcaagcacttttctctagagagagattgccccagagcttttcacccccacaagacgtaagtattatggaccaggtaatgaataatggtgttgagagaaatgggcaaaatgcaacagaaaccaatgaagatgcatcacagttagatctcaacagcaatacatgggaatcttgttcaggtgatcaagggcacctagagaacactggattaagagagaaggaaaatggaaaagatcacttcctgtcaattggtcttgctcaagggaagccaagggaccgtagaacaggttttaagccgtacaaaaggtgctctgttgaagccagggagagtaggttgaactcaaacagtcaagaccaagaaaaatgtcccaagagaatacgcttggaaggggaggcttcaacgtgatatcagattatgcttgcgttttgtgctagggaaaccttggccacagcaagtataccccatttatttttagtttctttatttcacttagctttatttaagttcttaaaagctcacgagacttttcgtgttgtgtgtactataactgactaaattggtctttcatttttcatccttcgtgttat

SEQ ID NO: 94 - protein, 739 aa, Mesembryanthemum crystallinum
MEAYSSGEELVIKTRKPYTITKQRERWTEEEHNRFLEALKLYGRAWQRIEEHIGTKTAVQIRSHAQKFFSKLEKEALVKGVPIQQAIDIEIPPPRPKRKPSNPYPRKTGAAGSPSTQIKVKDGNKVPPGSSHTANQLLDLEKEPPPENTTGDDGKQNAKETCGAYKCSETFTLFQEAPSTLTASGNENSAITTGATRKSCKVDDPVPKKLLVDIDGSDCPAADGRQRNQKLDKTDTVETAQNDTENEMHAVKNFPRHTPVHILDGSLGACSQALSSDVSYQESAFHRMGIPGYPAIFSNPAVSAAVESQNSTSRTTNQQMFTSFHPPFTPFPNTPEDYSSFVQMSATFSSLIVSALLQNPAAHAAASFAASFWPCSNMENSANCPAGLSGGFPPRPMNTAPSMAAIAGATVAAATAWWAAHGLLPLCAPVHSGFNCPPASANAPLTNVAQSQATNKEREENNFQNPGSQVQQPDQELSEALQPQHSASKPSATSSSDSGDSAGAKMEIEIPTNDNEIKVPAMTEQKDSSKGKSKKLVDRSSCGSNTPSGSDVETDALQKNDKGKEEPLEPDISQIAGELNNRRNRIASNNLNDSWKEVSEGGRLAFQALFSRERLPQSFSPPQDVSIMDQVMNNGVERNGQNATETNEDASQLDLNSNTWESCSGDQGHLENTGLREKENGKDHFLSIGLAQGKPRDRRTGFKPYKRCSVEARESRLNSNSQDQEKCPKRIRLEGEAST

SEQ ID NO: 95 - DNA, 2735 bp, Lycopersicon esculentum
aacatggctttcttcgaaggtttaggcatcatgcggttcgttttgtagtgttacattatcaggttcttttgtacaacaccacggatagactatatttgatagtaactgatgttgtggggagaatcggaagaagatttgttctgtatcccctgtttgtccctgaggatttgaagcagagatagctagctttggttcctttattttgatggacccttattcctcaggggaggaacttgttgttaagacaaggaaaccttatacaatcactaagcaacgagagcgatggacggaggaggagcacaataggttcctagaagctttgaaactttatgggcgtgcttggcagcgcatagaagaacacataggaactaaaactgctgtgcagatcagaagtcatgcgcaaaagttttttacaaagttagaaaaggaggctcttacaaagggggtcccaacaagtcaagcacttgacattgaaattcctcctccacgacctaaaaggaaaccaagtaatccttatcctcgtaagacaagcgcagcaggtcactcatcacaggtgggagcaaaagatgggaaatattcgacaactttttcttccatctgtgaggaaaggaacttatttgacctggagaaagaaccgattactgagaaacctggcggaaacgagaagctgggcaatgtaaaagaaacccagaacaagaaaaactgctcccaagggttaactaaggaaggtgcttctgcagcctctatgtcttcaggaaagtccttgcaagcacatgtggcacctacagatgtgtgtgcctttagtgagtctgtgtctgtcaccaaaggagtggttaacaatgataacgcaaataaatcttttctcattgttgaatccaaagaacatcaacagtcagaaatactcgatatcagacagtcctttcaaggtaacagctcctgtaacacctttgacggggggaaatcttgccagtcgagtgaaaagttggcacaaggtgagaaaaaacatccatcgtttcagccaaaccatttgggggaattctcaagaaatgatatgcaagtgctacacaactatccaagacatgtgccagtgcatattcttgatggaacaaatggttctcaaatagccccagatatgtttaatcatgaatctacgagtcagcagataaatggggtcccggggctcccaaatttgtattctaaccctgcttcatccaccacatctgagcaccacagtaacgctccacagtcatccattcatcagtcattttcttgtttccaccccattttcacccctattcgtgatccagatgattaccgatcgttttttcaattatcctccaccttctccagccttattgtttctgctttattgcaaaacccagcagcacatgtcgcagcaagttttgccgctagcttttggccttatgcaaatatggaacgtccaacggattctccaactgataacaccgctagccagattaactcagctcctagtatggcagcaattgctgctgccacagtagcagctgcaactgcatggtgggcagcccatgggctcttaccattgtgctctcaatttcaaagcagttttacctgtgttcctacatcagcaacatcaatgcaagtggatgcctgtcaacctagagtagacaagaacgaaggaagagagggaactcatgattctccccatgttcaggaacctgtcccagaatgctctgaagctttgcaagaacaacaatcaggttctaagttgccaccttctctatcatcagaatcggaggagagtgaaggtaggaagctaaaaactgggttaacggccactgatactgagcaaggagctgcagttactaaaattaatgagccaaacgcagaaaagggcgggaagcaggtagatcgctcttcctgtggatccaacacaccttcaagtagtgaaattgagacagatgctttggagaaggatgagaaaggtaaagaagagccccaagaatctaatattaaccttctagctggagaggctgcgaatcggcgttatagaaatttcatcagtccaaccgaatcttggaaagaagtctccgaagagggacggatagctttccaggctcttttcaccagagaagtgttgcctcaaagtttttctccttcacttgatctgaaaaataagggaaagatcattcttgaaaagttgaagcaaaagccagacgagaaagttcaatgtggaccgcagttagatcttaatgatatggcatccaatatctgttccagtcaccaaacaatggaagacaatgtgttattaattggcaacaaagaagatgtagaaacatgcctaccaatgatagaacttggacaagtaaggttgaaagctcgccgtactggatttaagccttacaagaggtgctcattggaggcaaatgatagcagggtgacaagttctaactgtcaggatgaagaaaaaagctcgaaaagacttcggttggaaggagaagcttctacttagtgttgtatcaatgtgcaattctacgagggaacctgtgttgttgcacggagagctctattctatcctgttattatcttttcccagttacgttgtctagttctaatgtacacgaaacttgtcgtgtaggtgtgtaccatattatttttatgttctcttttaattggacttgtatgcaagggactttgaagtatgaacctaaatgtggatgtcttcaacaatcatagcaaaaaaaaaaaaaaaa

SEQ ID NO: 96 - protein, 762 aa, Lycopersicon esculentum
MDPYSSGEELVVKTRKPYTITKQRERWTEEEHNRFLEALKLYGRAWQRIEEHIGTKTAVQIRSHAQKFFTKLEKEALTKGVPTSQALDIEIPPPRPKRKPSNPYPRKTSAAGHSSQVGAKDGKYSTTFSSICEERNLFDLEKEPITEKPGGNEKLGNVKETQNKKNCSQGLTKEGASAASMSSGKSLQAHVAPTDVCAFSESVSVTKGVVNNDNANKSFLIVESKEHQQSEILDIRQSFQGNSSCNTFDGGKSCQSSEKLAQGEKKHPSFQPNHLGEFSRNDMQVLHNYPRHVPVHILDGTNGSQIAPDMFNHESTSQQINGVPGLPNLYSNPASSTTSEHHSNAPQSSIHQSFSCFHPIFTPIRDPDDYRSFFQLSSTFSSLIVSALLQNPAAHVAASFAASFWPYANMERPTDSPTDNTASQINSAPSMAAIAAATVAAATAWWAAHGLLPLCSQFQSSFTCVPTSATSMQVDACQPRVDKNEGREGTHDSPHVQEPVPECSEALQEQQSGSKLPPSLSSESEESEGRKLKTGLTATDTEQGAAVTKINEPNAEKGGKQVDRSSCGSNTPSSSEIETDALEKDEKGKEEPQESNINLLAGEAANRRYRNFISPTESWKEVSEEGRIAFQALFTREVLPQSFSPSLDLKNKGKIILEKLKQKPDEKVQCGPQLDLNDMASNICSSHQTMEDNVLLIGNKEDVETCLPMIELGQVRLKARRTGFKPYKRCSLEANDSRVTSSNCQDEEKSSKRLRLEGEAST

SEQ ID NO: 97 - DNA, 516 bp, Glycine max
  misc_feature (340)..(340): n is a, c, g, or t
acgagcagagacggatctcttcctattgttctcgctttgtttcttttgcagtagcatcatcatcatcaccataccttgttcagattctgctcactttcaccacaacggctttactatttaccgcgtttagttttcgtgtcaccgcaaataatgaaaggaggtgttccctgtatccactcctcgtcagggaagatctgaagcagtgctagctgctcacgtcctgtaatggacgcatactcctccggcgaagaagtggttgctaagactagaaaaccatatacaatcactaagcaaagggaacgatggacagaggaggagcataataggtttctagaagctntgaaactacacgggcgaccatggcagcgcatagaagagcatataggaacaaagactgccgtgcaaataaggagtcatgcacagaagttctttacaaagctggagaaagaggcccttgtaaagggtgttccaattggacatgctcttgatatagacatatcccctccacggcccaaa

SEQ ID NO: 98 - protein, 97 aa, Glycine max
  UNSURE (39)..(39): Xaa can be any naturally occurring amino acid
MDAYSSGEEVVAKTRKPYTITKQRERWTEEEHNRFLEAXKLHGRPWQRIEEHIGTKTAVQIRSHAQKFFTKLEKEALVKGVPIGHALDIDISPPRPK

SEQ ID NO: 99 - DNA, 2290 bp, Lemna gibba
  misc_feature (2200)..(2200): n is a, c, g, or t
  misc_feature (2217)..(2217): n is a, c, g, or t
  misc_feature (2237)..(2237): n is a, c, g, or t
  misc_feature (2266)..(2269): n is a, c, g, or t
  misc_feature (2271)..(2271): n is a, c, g, or t
  misc_feature (2283)..(2287): n is a, c, g, or t
ctaatacgactcactatagggcaagcagtggtatcaacgcagagtacgcgggggttcgtccaggtgcacttcaaaaaaacttccttccttctccattcgaccattgaggtctcgccacgtggatccgattcgcctttcgaaagattttccaggccgagaaatctcctcgcggatggagtggcggagagctctccagaaggtgacttctggctggatttagctggtaatcaaccactacagtaagttccttctctgctccctccgccggcggatcaccggattccgtctattaggtgaaagccgtccggatccgtggaggagaagcggccatgaggaagaagaagcggagggatccggagagctttttccgtttttaagttcttgattgaaggttgcgccaaggtctgtgccttttattttcctaaattgttttccctccgaggttctgcaggatgatccggccgcggtatccaaggcgcgaggttgaaatgaatctctacgtttcgaattgatttatcgatggtgtttggaaacgagttcttcaggtcgaacgtctgatcgaagacctcgtggttgaagatctgcggtagagagaattcccgatcctctcggctctgcgaaatggatgcaatctcctccggagaggatttcattttaaagacaaggaaaccgtatacgataacgaagcagcgggaaaagtggactgaagaggagcacagaaaattcctggaggctttgaaactctatggccgatcttggcagcgcattgaagaacatatcggcactaagacagctgttcaaataaggagtcacgctcagaaatttttctctaagcttgaaaaggaagcggtaatcaaaggcgttcccttaggacaagctcatggcatcgagatccctccaccccgccccaagcgcaagcctaacatcccctaccctcgaaaaatctcctccgacattgatgggtctcaccagaaggtggcatccgacgaggacaagtgcttcatgggccttgcgctctttcaagactcgccttgcacgacaaagcccagttcggatgttgaccttggtagattcgagggcctcagcattgattcttgtgttaggaaaggagacgcaaagtcaacttcccacggcggctccatgtcaggggtcacgagagatcaacacaaggcgaagtctatgccattcgccgcctccgacttctccgcattcttcaacctgtccgcacagttttcaaaccttgtcatctcaaccctgttgcagaatccagccgcccacgcggctgccacgctggcagcttcattctggcctgctgctggcatgaagacttccacgggtaccacgccagacaatcagacaaatccaaccccaagcatggaggcaatcgtagccgccacggtggcggccgcatcagcatggtgggccgcccatggattattacccctttgtcctctggcagggttattcccgggtatctctgcattctctccgggcccgaaagtggaagaggcggcaaacccaagatcaaagtcaatgccttcgtcatccgactccgacgagctgaacccaacaaagcaggtgagttgtagtaaaccagatgaatctggaagagagaagaagaaggcggaccgatcctcttgtggctccaacacaccttccagcagcgatgtggagacggacgttgtattggaccttgaaaaggaggaccttcatctgggcctggcctactcggcttcctggaaagaagtctctcaccagggtcgtgaggcgtttcaagcactgttcaatcgagaggtgctgccgcagagcttctcgccccccaaggaagaggaaggccgggccaagccgcggcgaaccgggttcaagccctacaagaggtgctccgcgaccccgacccacgcttccggcgaaaacgacaggaagagaatacgcctccagaacgagccctcactctgaaatctttcattagtggaatttctcgactacatttatttatccttatgttttctagaaagagaactcgccgagcagcggtgaagatgggattctatgcaggcgatgtaccaaagtattctctgctggtcggcgtatgagagagaaaatggaggactcaagggcagagatggaccttctcttacaaggaatgagaagagaatgacagcattagaatattccactatagcactatccaagtttcccnagaattcatccacctgnaaataattaattaaaataantattatcaccattttttttatttcgtaannnnanaataagcgctgnnnnnagg

SEQ ID NO: 100 - protein, 444 aa, Lemna gibba
MDAISSGEDFILKTRKPYTITKQREKWTEEEHRKFLEALKLYGRSWQRIEEHIGTKTAVQIRSHAQKFFSKLEKEAVIKGVPLGQAHGIEIPPPRPKRKPNIPYPRKISSDIDGSHQKVASDEDKCFMGLALFQDSPCTTKPSSDVDLGRFEGLSIDSCVRKGDAKSTSHGGSMSGVTRDQHKAKSMPFAASDFSAFFNLSAQFSNLVISTLLQNPAAHAAATLAASFWPAAGMKTSTGTTPDNQTNPTPSMEAIVAATVAAASAWWAAHGLLPLCPLAGLFPGISAFSPGPKVEEAANPRSKSMPSSSDSDELNPTKQVSCSKPDESGREKKKADRSSCGSNTPSSSDVETDVVLDLEKEDLHLGLAYSASWKEVSHQGREAFQALFNREVLPQSFSPPKEEEGRAKPRRTGFKPYKRCSATPTHASGENDRKRIRLQNEPSL

SEQ ID NO: 101 - DNA, 1466 bp, Zea mays
  misc_feature (1392)..(1392): n is a, c, g, or t
  misc_feature (1406)..(1406): n is a, c, g, or t
  misc_feature (1418)..(1418): n is a, c, g, or t
  misc_feature (1425)..(1425): n is a, c, g, or t
  misc_feature (1444)..(1444): n is a, c, g, or t
ccacgcgtccgctgcctgctcacttccgttccgtagtccagctagatccccgggcaaccgatccaccgagaagcttgtggttgtggcggcggcggagagggaagcggggagcgggaggtcggaggcctccgtgcgtcggaggtggacgagggagcgaggcggcgccagaccgaggttgcgtcgggctcgatttctactgggctgctgtctgctgagtttacggaagtgtttggccctagaagagttgaagataaggagtggagctaggtttaaactctggtgacttggttgttgtgtgcaacgaatcaactatgctgagtttttctgtagagtaacagaaattggatcaattcaagtagaggtctaggaggagatatgaggtactacttgcgtcaggtccagcgtttggttggagatatggaaggaggagctctcttgtttatagacgacctcaactccaagtgacaaagcgaacagctgttgaacgtttcccttctatttctgtttctttttgccggatttggagatggaggtgaattcctctggcgaggaaactgtggtaaaggtaagaaagccgtacacaataacgaagcagcgggagcggtggacagaggctgaacacaaacggttccttgaagccttgaaactttatggcagagcatggcagcgcatagaagagcatgttgggacaaagacagccgtgcagatcagaagtcacgctcaaaagttcttcactaagttggaaaaggaagctatgaacaatggtacttctccggggcaagcccatgacattgacatacctccaccacggcctaaaagaaagccaaacagtccatatcctcgaaaaagttgtctcagctccgagacacaaaccaaagaacttccaaatgacaagtcaacaaaaccaaatatgcccttgagcaatgggcatgtaaaaatggtaggcgatgcatctcttcagaattttcaaaggaaggagttgtctgaaaaaggaagtcgctcggaagttcttaatctcttccgtgatgccccatctgcatcattttcttcagttaacaaaagctcttcaaatcatggggcacccaggaggaccgaggcaagtaaaacagaaagccgagatatgtccatcatggaaaataattcttttaaccccaacacccaagaggatgtaaaggtgatcagtgatcaggaaatggaaaggcttaatggtatccagatcagatctaaatgtgaacattctcatgaggggtatttggacatctcaacgcaacaaatgaagctaatgccaaagtctgtggagacaacatatgtggatgaacaaactgcaagagcttcacacaccctagcagagagcaacggggacagctagcgttccagtgactgtacctgaanggactccatcctgntcaaacaagtgntccagtngggatccatgggagcatgnacccatggatccatcccatggt

SEQ ID NO: 102 - protein, 280 aa, Zea mays
MEVNSSGEETVVKVRKPYTITKQRERWTEAEHKRFLEALKLYGRAWQRIEEHVGTKTAVQIRSHAQKFFTKLEKEAMNNGTSPGQAHDIDIPPPRPKRKPNSPYPRKSCLSSETQTKELPNDKSTKPNMPLSNGHVKMVGDASLQNFQRKELSEKGSRSEVLNLFRDAPSASFSSVNKSSSNHGAPRRTEASKTESRDMSIMENNSFNPNTQEDVKVISDQEMERLNGIQIRSKCEHSHEGYLDISTQQMKLMPKSVETTYVDEQTARASHTLAESNGDS

SEQ ID NO: 103 - DNA, 1787 bp, Lemna paucicostata
  misc_feature (1757)..(1758): n is a, c, g, or t
  misc_feature (1769)..(1769): n is a, c, g, or t
  misc_feature (1772)..(1772): n is a, c, g, or t
  misc_feature (1778)..(1778): n is a, c, g, or t
ctaatacgactcactatagggcaagcagtggtatcaacgcagagtacgcggaagcagtggtatcaacccagagtacgcgggaaatcttcgcaagaatctagtggcggagagcgccggcgaaattctggctggtatttagctggtcgtcgagctccggtgccattctttttcgcccccattggccgcggcttcagaatcggggagaaaggcgccgcggatccgtggaggcagtcatgagaaagaggaagaggaggaatttgggatgattaatccgtgctagtattcccgatcgtctgatctctgcattatggatgtgaactcctcgggagaggacttcgtcttgaaggcgaggaaaccgtacacgattacgaagcagcgggaaaagtggactgaagaggagcacaacaagttcttacaggctttgaagctctacggccgatcttggcagcgaattgaagaacacatcggctctaagactgctgtccaaattgggagccacgcacaaaaattcttctcaaagcttgaaaaggaagccctcatcaaaggtgttcccttggggcaaggccaaggcatcgagatccctcctccccgtccgaagcgcaagcctaacaacccataccctctcaaaacctccatctctaatggcattggcgggctccaccagaagaaagcttcttcagatgaggacttattgggactttcactcttccatgatccatcctgcaaaacaaagcccagcccggatgttgaacttggcagatttgagggtctcagaatcgacacgagtctgaagaaaggtgattcaaagccaaaatccatcagcggcaccacgtcgggaacaacaacagaccagaatgctgaaaagtcaatgcaattgaccgcttctgccttccctccattcttcaacatgtcagcggagttttccagcttagtagtctcaaccttgctgcagaacccagctgcctatgccactgcaatgctggcagcttccttctggccacctgctgacgtagacacttcttcggatcccggatcagacggacggataaaccccactccaagtattgcagccattgctgctgccacagtggccgccgcgtctgcatggtgggctatgcatggattattaccattttgcccccctgcaggattatttcctggcgtcttccccttggctccgagcctgacagtggaagaagctggtcaaaggtcaaagtcaattccctcgtcttctgaatccgacgagcggaatccagcaaatgaaacgaatcgcgagccggacgaacccagaggagagaagaagaaggcggaccggtcctcttgtggctccaacacgccctccagcagcgatatggagaccaatgctgtattggaccttgaaaaggaggaccttcatcttggcccggcccactctccctcctggaaggaagtctcccaccagggccgtaaggcgttccaagcgctgttctccagagaggtgctgccgcagagcttctcgcccccgaaggaagaggaaggccggtctaaaccgcggcgaaccgggttcaaaccttacaagagatcctctgcatccccggttcatgcttccagtgaaaacgacgtaaagagattacgcctacaaaatgagtccttcccctgaacttgcttattattgctttcttgaaaaagaactccttgagcctaacagagtaacgtgtataaaagtagtctctgctttgtttacttatgaaaggataatgaagaatttaacggaatannaaaaaaaaaanaanaaaaanaaaaaaaaa

SEQ ID NO: 104 - protein, 443 aa, Lemna paucicostata
MDVNSSGEDFVLKARKPYTITKQREKWTEEEHNKFLQALKLYGRSWQRIEEHIGSKTAVQIGSHAQKFFSKLEKEALIKGVPLGQGQGIEIPPPRPKRKPNNPYPLKTSISNGIGGLHQKKASSDEDLLGLSLFHDPSCKTKPSPDVELGRFEGLRIDTSLKKGDSKPKSISGTTSGTTTDQNAEKSMQLTASAFPPFFNMSAEFSSLVVSTLLQNPAAYATAMLAASFWPPADVDTSSDPGSDGRINPTPSIAAIAAATVAAASAWWAMHGLLPFCPPAGLFPGVFPLAPSLTVEEAGQRSKSIPSSSESDERNPANETNREPDEPRGEKKKADRSSCGSNTPSSSDMETNAVLDLEKEDLHLGPAHSPSWKEVSHQGRKAFQALFSREVLPQSFSPPKEEEGRSKPRRTGFKPYKRSSASPVHASSENDVKRLRLQNESFP

SEQ ID NO: 105 - DNA, 1439 bp, Glycine max
cgcggatccgccaaccacagaggagaagatattcaccacatggcgatacaaggccaaaatgcatttactagatcacagggtggtcttccaattggagatgaaatatctttcaattctggtgtgcattctgttgcagatattccactacatgatcagttatcttgtggaaatgactatgccttgaaggttaggaaaccatatactatcacaaagcagagagagaggtggacagatgaagaacataagaagttccttgaagccttaaagctatatggcagggcctggcgacggattgaagaacatgttggcacaaagactgctgttcagattcgaagtcatgctcagaagtttttttctaagattcttcgagagtctagtgggaacagtacaaccttggaggagtcaattgaaattccacctccgcgaccaaaacggaagccaattcatccttaccctcgtaagctagttgagtttccaaagacaggaatttccaactcagaacacccactgaggtctaattctctgaagtcatcagattttggtcaagaaaacaattctcccaagtcagttttatctacagttgtttcagaaactgttggttcctccgattcagatacatctagtcgatgtttgtcaccagcctcatccattagtggtgtccccacaaacagatttccacttgctgagcccaaaacatcatttaaggaagaagggtctgcaccaagttcagctcatgatgagcaacctcctgtgaaactggagtttcttcacaaagaaagtgtttctaccagagatgatgcaacagaagaatcatctggtcgtactctcaaactttttgggaccactctactggtaacagacacatgcaaaccttcttccccaacaacggagccgtgcaaaccaacacctgcggctgcaatgtatcttatgcaacttcagaatggatgttcagatgttacagaaggtcatgcttctattgttccttggtggactcttccccacaatactccatttatgccactgcacaaggagccaaaagggaagcatctatattctaatcttggagagtttgaacataaagaagttcaaaaggaaggatcatggactggttcaaacactagttcaattgatgatggagataacactgaaaaatcaggtgatcaagccaaaagtcatgtacatggttttagcaaaagtgaaactttaactatatctgagctaagggtgaggcctaaaacatgtggaaaagggtttgtaccatataaaaggtgcatggcagagagggaaaaccagtgctcatcagtatattatgaggaaagggaagagcaacgtattaagctttccttatagtaccctcttattggcttttcttcaaagcagtttcccttttacaggtataatgtacctgtttctgttgctggatgaccttgggtaccccg

SEQ ID NO: 106 - protein, 436 aa, Glycine max
MAIQGQNAFTRSQGGLPIGDEISFNSGVHSVADIPLHDQLSCGNDYALKVRKPYTITKQRERWTDEEHKKFLEALKLYGRAWRRIEEHVGTKTAVQIRSHAQKFFSKILRESSGNSTTLEESIEIPPPRPKRKPIHPYPRKLVEFPKTGISNSEHPLRSNSLKSSDFGQENNSPKSVLSTVVSETVGSSDSDTSSRCLSPASSISGVPTNRFPLAEPKTSFKEEGSAPSSAHDEQPPVKLEFLHKESVSTRDDATEESSGRTLKLFGTTLLVTDTCKPSSPTTEPCKPTPAAAMYLMQLQNGCSDVTEGHASIVPWWTLPHNTPFMPLHKEPKGKHLYSNLGEFEHKEVQKEGSWTGSNTSSIDDGDNTEKSGDQAKSHVHGFSKSETLTISELRVRPKTCGKGFVPYKRCMAERENQCSSVYYEEREEQRIKLSL

SEQ ID NO: 107 - DNA, 1999 bp, Triticum aestivum
ctcgtgccgaattcggcacgagctcgtgccgcgcctcttcgcctctcttctcttctcctgcctgcccctccctcctcgcgctccatcgacaacgagcacctcgtcttgttcttggtcttggcttttggtgtggcgacgttgggtagtgtgattatcttgttctcgctggcaggagatggcctgtacgcaggagaacgccatggcaaccgacgaaagcacggcggatcatcgcgggagtcgtccgagttcccacgacatggatttatcaggggatgaccacgtgccaaaggcacgcaagccgtacaccatcacgaagcagcgggagaagtggaccgaggaagagcacaagcgcttcctggaggccctgcagctgcacggccgcgcctggcgccgcatacaagagcacataggcaccaagacggcagtgcaaatccggagccacgcgcagaagttcttctctaaggtcaccagagagtcgtccgggagctgcagcggctcgggcgccgcggccgcgacggcgacggcggcgatccagatccccccgccgcggcccaagaggaaaccgacgcacccgtacccgcgcaaagcggacgacggcgcggcggccggcggtaagcacgccccggggctcacgcatctggagaggcctcccgtgcggatgggcgagcaggaggaagggtcgccgacgtcggtgctgaccgcgtcgcgggtcgaggcctccggtggccgcttctcctacaactccagcggcagcaggtcgccggttccgtcggccgccggctccctctacggctcgtcggtggacagaggggacggctgcctctcgcctaatacgactaaggcttcagagttcactgcaaatggtgatgtcaaagaggggtcatgtacaggatcagcgacatcagtccttaagctattcggcaagaaagtcgtggtgaatgattcattccagaagccgaataccagcaccggcaacccgcagaatggtggcgacgtcggaactgaagcttcagacgatacaaccacacaaggaagcagaaacctaccttctggcggtgccacagaaggaagctcatggaatccatggccgagcagcatgcagcagtttgtgtattttgttcctcaaccggatggtttcgccacacaatctgcggtgccatggtttggcaccctgcctggtgcaatgttctaccagcaagccatggctccaaatcagcaccagcgccatcgctcagagaccgcagaccacaagttcatgcagagggaaggatcctggacaggatcaaacactggccctggatcagctgcgcataattcagatgctgccgactcccgagggagaggaaacagcagtgagagcgacaaaacgcctgtgccgcggttaacaaagtgcgagagctctgtttcggtcagtctgcaaagaggtttcatgccatacaagagatgcgcggccgagagcgaatcgctgcggtcggaggcgcccagagaggagaccgacggtgagttgacgaggctgtgcttgtgacagccgaagattcgacacgctcttcacagtttagatgtttgctagttttgctctagactcttgagctggtggtgtgatctgcagtgggaagaagcgaccactcatcctgctggttttgcctgtcggtatgtcgcacttctccgaagcagctcgaagccgcattagattgagcatttctggttcttgctcgtgaatatatatagttggaatatgtagtatccatgtttttgttctctacagagtgtctctgcagtttttaccccaaatcgggaggctcagagttcagtgttgttgcctgtatcaacctgggcctgagagagggttgtcgtagtcttaactgcatgttgtaagctaggcaggcttgtatcactctgtagtctgcattctgtaaaacatatgataggcagaagacgaacaaaaacgtcgaatgctctgtatatctaaagtataacataatataaaaaaaaaaaaaaa

SEQ ID NO: 108 - protein, 449 aa, Triticum aestivum
MACTQENAMATDESTADHRGSRPSSHDMDLSGDDHVPKARKPYTITKQREKWTEEEHKRFLEALQLHGRAWRRIQEHIGTKTAVQIRSHAQKFFSKVTRESSGSCSGSGAAAATATAAIQIPPPRPKRKPTHPYPRKADDGAAAGGKHAPGLTHLERPPVRMGEQEEGSPTSVLTASRVEASGGRFSYNSSGSRSPVPSAAGSLYGSSVDRGDGCLSPNTTKASEFTANGDVKEGSCTGSATSVLKLFGKKVVVNDSFQKPNTSTGNPQNGGDVGTEASDDTTTQGSRNLPSGGATEGSSWNPWPSSMQQFVYFVPQPDGFATQSAVPWFGTLPGAMFYQQAMAPNQHQRHRSETADHKFMQREGSWTGSNTGPGSAAHNSDAADSRGRGNSSESDKTPVPRLTKCESSVSVSLQRGFMPYKRCAAESESLRSEAPREETDGELTRLCL

SEQ ID NO: 109 - DNA, 1501 bp, Glycine max
acgagagaagatcttgattcttgacaagagattgtttcttctgcagctatggcgattcaagatcaaaatggatttttcagatcacagggtggtcctccagaaggaggtggtgtatctttgagttctgggcattctgtcacacatattcaacttaatgaccagttttcttgtgggaatgactatgctctgaaggtaaggaagccgtatactatcactaaacagagagagcgatggacagatgaagaacataagaagttccttgaagctttaaagctgtatggacgggcttggcgacgtattgaagaacatgttggcacaaagactgctgttcagattcgaagtcatgctcagaagtttttttctaaggttcttcacgatcctactgggaacaatacaaacacagtggagtcaattgaaattcctcctccaagaccgaaacgaaagccgatgcatccttaccctcgtaaactagttgagaccccaaataaggaaatttcgatcccagaacaacctatgaagtctaattctctgaagtcgtcagactttgatcaagaaaaccaatctccaaaatcagtattatcaggagttggttcagacagccttggctcctctgattcagacacaccaaatggaagtttgtcgcccatgtcatccattagtggcttccatacaagcagttttacacgtgccaaacccaaaacaacaacatctgaggaagaagctgggatggacactgattcaactcatgatgagaaacctcttatgaaattcaagcttcctccaaatggatgtgtttccatcaaagaagacaacacagcagaagaatcttccggtcggactttcaaactctttggaatgactctatttgtaacagacacctgcaaaccatctccaacaatcgaggaatgctaaagatacctctaaacattcgcgcgcaacgcctttcctcctccatggaggatggcaaattggaacttgttggacactctagagcaagtgaaacatcagcaatatccaagctaaaggtgagagtggaacctgaagcatgtgggaaagggtttgtgccatataaaagatgcatatctgttgtgacagctgatgatagagaagagcaatgtatccatctttccttgtagcttataccccactggatttttccttcaaaaagtgttccctttgtcatgatgagctgtaatggttgttttggttgctgctggatgtgagttggtatgatataggaaggaaaaaggggtggctgaaaattttgatatttccgttgaattgcactgcactgcacattctccagctgttcaaatccgtaaacttgccttttctatttttttgacttccaagtttcaacacattctccgcgggtccaagccgtgtctgtgcgcggcacttaggagctgtgtccgtgcttcctagtttaactgtgaataactgtgaattatatctagtgccttttttttaaaaaaaaaaaaaaaaaaaaaaaaaaaactcg

SEQ ID NO: 110 - protein, 287 aa, Glycine max
MAIQDQNGFFRSQGGPPEGGGVSLSSGHSVTHIQLNDQFSCGNDYALKVRKPYTITKQRERWTDEEHKKFLEALKLYGRAWRRIEEHVGTKTAVQIRSHAQKFFSKVLHDPTGNNTNTVESIEIPPPRPKRKPMHPYPRKLVETPNKEISIPEQPMKSNSLKSSDFDQENQSPKSVLSGVGSDSLGSSDSDTPNGSLSPMSSISGFHTSSFTRAKPKTTTSEEEAGMDTDSTHDEKPLMKFKLPPNGCVSIKEDNTAEESSGRTFKLFGMTLFVTDTCKPSPTIEEC

SEQ ID NO: 111 - DNA, 479 bp, Glycine max
gtctctgtggaggtttgggtgttttttgaggcagagcttattctcattttgctccaatggagatgcaggaccaaatagaaagcacaagatcaaccatatttggctcagctagtaacatccattccaatgctgaaaagcaggccgaaaatgttgctcccaaggtgaggaaaccatataccattactaaacaaagggagaagtggacagaggaagagcatcaaaagttccttgaagctttgaaattgtatggtcgtggctggcgccaaattgaagagcatataggtaccaaaactgctgttcagattcgaagccatgctcaaaagtttttctctaaggttgtgagggaatctgaggtcagtgatgagggttctatacaaccaattaacatacctcctcctcggcctaagaggaaacccctgcatccatatccccgtaaatcagttaattctttcagaggacccaccataccaaatgaaaca

SEQ ID NO: 112 - protein, 141 aa, Glycine max
MEMQDQIESTRSTIFGSASNIHSNAEKQAENVAPKVRKPYTITKQREKWTEEEHQKFLEALKLYGRGWRQIEEHIGTKTAVQIRSHAQKFFSKVVRESEVSDEGSIQPINIPPPRPKRKPLHPYPRKSVNSFRGPTIPNET

SEQ ID NO: 113 - DNA, 1141 bp, Glycine max
  misc_feature (664)..(664): n is a, c, g, or t
  misc_feature (1101)..(1101): n is a, c, g, or t
tcattttctcggaaaattcttcttttccgagaaatttcgcgtttttactgttgaatcgataattcacaaatcgggggtgtctgaaattcaaagctgttgttgttgttggctgctggggttagtctctgtggaggtttgggtgttttctgaggcagagccgattctcattttgctccaatggagatgcaggtctcaatcatcttacgttcactcttctggagacttttctcctcttttaataggaaaaaagagaatttcaatatgaattcatccagtgactttatttctaaggaactgaaatatattctagaccaaatagaaagcacaagatcaaccatatttggctcagctagtaacatccattccaatggtgaaaagcaatccgaaaatgttgctcatataccttctgttggaaacaaccaaactcccaaggtgaggaaaccatataccattactaaacaaagggagaagtggactgaggaagagcatcaaaagttccttgaagctttgaaattgtatggtcgtggctggcgccaaattgaagagcatataggtaccaaaaatgctgttcagattcgaagccatgctcaaaagtttttctctaaggttgtgagggaatctgagggcagcgctgagagttctatacaaccaattaacatacctnctcctcggcctaagaggaaacccctgcatccatatccccgtaaatcagttaattctttcagaggacccaccataccaaatgaaacagaaatatctccatctacaaacctgttggttgcagagaaagacaccccatctccaacctcggtgctatctacagttggttcggaagcatttgggtctcaattttcagagcagactaacagatgcctttcaccaaactcttgcaccactgatattcactcagtcagcttatcacctgttgaaaaggaaaatgattgcatgacatccaaagaatctgaggaggaagagaaagcatcaccagcttcacgtcctttatccactgtttctaacccaaaaatgtgcatgaaacctgagtttagttccaaggagatagaagatgctactgatatgccacaaaccactagtattaagctntttggaagaacagtctctatggtaggtaatcagaagtcac

SEQ ID NO: 114 - protein, 321 aa, Glycine max
  UNSURE (163)..(163): Xaa can be any naturally occurring amino acid
MEMQVSIILRSLFWRLFSSFNRKKENFNMNSSSDFISKELKYILDQIESTRSTIFGSASNIHSNGEKQSENVAHIPSVGNNQTPKVRKPYTITKQREKWTEEEHQKFLEALKLYGRGWRQIEEHIGTKNAVQIRSHAQKFFSKVVRESEGSAESSIQPINIPXPRPKRKPLHPYPRKSVNSFRGPTIPNETEISPSTNLLVAEKDTPSPTSVLSTVGSEAFGSQFSEQTNRCLSPNSCTTDIHSVSLSPVEKENDCMTSKESEEEEKASPASRPLSTVSNPKMCMKPEFSSKEIEDATDMPQTTSIKLFGRTVSMVGNQKS

SEQ ID NO: 115 - DNA, 470 bp, Glycine max
acgagaactagtctcgagtttttactgttgaatcgataattcacaaatcgggggtgtctgaaattcaaaggaccaaatagaaagcacaagatcaaccatatttggctcagctagtaacatccattccaatggtgaaaagcaatccgaaaatgttgctcatataccttctgttggaaacaaccaaaactcccaaggtgaggaaaccatataccattactaaacaaagggagaagtggactgaggaagagcatcaaaagttccttgaagctttgaaattgtatggtcgtggctggcgccaaattgaagagcatataggtaccaaaaatgctgttcagattcgaagccatgctcaaaagtttttctctaaggttgtgagggaatctgagggcagcgctgagagttctatacaaccaattaacatacctcctcctcggcctaagaggaaacccctgcaatccatattcccccgt

SEQ ID NO: 116 - protein, 114 aa, Glycine max
MVKSNPKMLLIYLLLETTKTPKVRKPYTITKQREKWTEEEHQKFLEALKLYGRGWRQIEEHIGTKNAVQIRSHAQKFFSKVVRESEGSAESSIQPINIPPPRPKRKPLQSIFPR

SEQ ID NO: 117 - DNA, 1297 bp, Glycine max
acgaggaaagccttatactatcaccaaacagagagagcgatggacagatgaagaacataagaagttccttgaagctttaaagctgtacggacgggcttggcgacgtattgaagaacatgttggcacaaagactgctgttcagattcgaagtcatgctcagaagtttttttctaagcttcttcgcgatcctactgggaacaatacaaacacagtggagtcaattgaaattcctcctccaaggccgaaacgaaagccagtgcatccttaccctcgtaaactagttgagacccctaataaagaaattttgatcccagaacaacttatgaagtctaattctctgaagtcatcagactttgatcaagaaaaccaatctccaaaatcagtattatcaggagttggttcagacagccttggctcctctgattcagacacaccatatggaagtttgtcgcccatgtcatccattagtggcatccatacaagcagttttacacgtgctgagcacaaaacaacatctgatgaagctgggatggacactgattcagctcatgatgagaaacctcttatgaaattcaagcttcctccaaatgaatgtgtttccatcaaagatgacacagcagaagaatcttccggtcggactttcaaacttttcggaatgactctatttgtaacagacacctgcaaaccatctccaacaatcgaggcatgcaaaccgatacctctaaacattcgtgtgcgatgcctttcctcctccatgggggatgatggcaaattggaacttcgtggccactctacagcaagtgaaacatcagcaatatccaagctaaaggtgagagtgggacctgaagcatgtggtaaagggtttgtgccatataaaagatgcatatctgttgtgacagctgataatagagaagagcaatgcatccatctttccttgtagcttaccccactggatatttcttcaaaagggttccctttgagatgatgagctgtaatggttgttttagctgctggatgtgagttggcataaaatagggagctgaaaattttgacatttctgttgcattacactgcacattctccagctgttcaaatccgtgaacttgccttttgtatttttttgactttcaagtttcaactgtgaattatatctagtgtttttgtttgtttttttttaaaaactttttatgctccttaagagtatgcaaagtgtaagtcacgtacttgtgcagtgcttattaacgtacttgttcatagattctgcatttactaccatgatgggaattttttctaacga

SEQ ID NO: 118 - protein, 312 aa, Glycine max
RGKPYTITKQRERWTDEEHKKFLEALKLYGRAWRRIEEHVGTKTAVQIRSHAQKFFSKLLRDPTGNNTNTVESIEIPPPRPKRKPVHPYPRKLVETPNKEILIPEQLMKSNSLKSSDFDQENQSPKSVLSGVGSDSLGSSDSDTPYGSLSPMSSISGIHTSSFTRAEHKTTSDEAGMDTDSAHDEKPLMKFKLPPNECVSIKDDTAEESSGRTFKLFGMTLFVTDTCKPSPTIEACKPIPLNIRVRCLSSSMGDDGKLELRGHSTASETSAISKLKVRVGPEACGKGFVPYKRCISVVTADNREEQCIHLSL

SEQ ID NO: 119 - DNA, 969 bp, Ostreococcus tauri
ggcgaggccccatcgagtaatgataccggtgatgaggccacggtgacgacgaacgacgccacgagcgatccgacgacgacggaggggaaggcggtgaagacgcgcaagccgtacaccattacgaagaagcgcgagcgatggtccgacgaggagcacgcgttgttcgtagagtcgttaaaaaagtacggacgcgcttggaaaaggattgaggagtacattgggacgaagagtgcggtgcaaattcggtcgcacgcgcagaaatttttcgccaagctacaaaaggagcagatcgtcgcgagcggaagcgagggctctgggagcacgcgaaagcgtggagcggatcgatcgacgtcgcagagcaagagaagcaagtctagctatgcgacggatatcaatcttgagattccgccggcgcggcctaagaagaagccggcgcatccgtacccgaggaaggcgacgtctcagcagccgagcggcggaagcggagagcgagacaactctggtgggactggtaagagctccggtacggcgcaaaagtggcctaccgaggcgagtcaggagtttatcgctagtacgtcgtcgagcgccgcgatagcagccgtgctttcggtcgcttgcgataagatgcagaacaatttgcatcaagagttgcggcaaggatattttggaataccgaccggcatgcaaccgcagcagggaatgtttgcccagcctgggatgtttccgatgaacgcgatgatgagtccgttcgtggcgatgaacaccgtctccggcgcgccgacaccgccgccgatgaccaatccacagcaatttcttaactacgccaacttcttcagcaactattggcctcagttcgccaacgccgctaacgccaacgctgtgaatgtgatgttccaacaacaacagcaacagcaacagcaacagcaacaacaacaacataaacagcgggcgggtggtgaaaccaaataa

SEQ ID NO: 120 - protein, 322 aa, Ostreococcus tauri
GEAPSSNDTGDEATVTTNDATSDPTTTEGKAVKTRKPYTITKKRERWSDEEHALFVESLKKYGRAWKRIEEYIGTKSAVQIRSHAQKFFAKLQKEQIVASGSEGSGSTRKRGADRSTSQSKRSKSSYATDINLEIPPARPKKKPAHPYPRKATSQQPSGGSGERDNSGGTGKSSGTAQKWPTEASQEFIASTSSSAAIAAVLSVACDKMQNNLHQELRQGYFGIPTGMQPQQGMFAQPGMFPMNAMMSPFVAMNTVSGAPTPPPMTNPQQFLNYANFFSNYWPQFANAANANAVNVMFQQQQQQQQQQQQQQHKQRAGGETK

SEQ ID NO: 121 - DNA, 330 bp, Medicago truncatula
atggatgcagcagcatactcctctggagaagacgtcgttctcaagacaagaaagccatatacaatcacaaaacaaagagaacgatggactgaagacgaacataatcgatttctagaagccctcaagctatatggccgagcatggcagcgtatagaagaacatataggaacaaagactgctgtgcaaatcaggagccatgcgcaaaaattcttttcaaaggtcgattggtaccctctctcacctcccaatttatgctcaaactttttcttatttctattgggaaaaaactcaagtcccacatcggatataagactcttgatgggagtatag

SEQ ID NO: 122 - protein, 109 aa, Medicago truncatula
MDAAAYSSGEDVVLKTRKPYTITKQRERWTEDEHNRFLEALKLYGRAWQRIEEHIGTKTAVQIRSHAQKFFSKVDWYPLSPPNLCSNFFLFLLGKNSSPTSDIRLLMGV

SEQ ID NO: 123 - DNA, 1343 bp, Malus x domestica
tttcaatttaaaaaaaaaccaaggggaatccgactcttccgcaatttatggtatccaaaaacccgaacccgccagagggcttgtacttggatccgaacgaaagcggcatgccgttgcccggactcgggccgttcgcctcggccactgcgacgacgtcaacgacttcgtcttcggcggaggatctgagcaagaagattcggaagccctacacaattaccaagtccagagagagctggagtgagccggagcacgacaagttcctcgaagccctccaactcttcgatcgcgattggaaaaagattgaagctttcattgggtcaaagacggtcatacagatacgtagtcatgcacagaagtattttctgaaggttcaaaagaatgggacgagcgagcatctacctccccctaggccaaaaaggaaagctgctcacccatatcctcaaaaagcttcaaaaaatgctctggcacttccgccagtatcttggtcatgtcagtcttcatctgctttacttgaatctgggtttaatcaaaggccagattcatcatcaatgcttatgagtcctatccctggccctgtagccccttcctggcctaatggttctgtgcaaacagccaatccatctcatgagtccaaagttgtttcagggccaactgtgctgaacaacagttgcagtaccacagaaagcacccctaaagctcaaccagttggtggaacaactgatcaagtgaaccatagccatgcattgagagttcttcccgactttactcaagtatacggattcattggcagcgtctttgaccctaatgttacaggtcatcttcagaatctgaagaagatggatccgatagatgttgaaacggtgttactgttgatgagaaacctgtccatgaatttgaccaatcccgaattcgaggatcatagacagttgctttcatcctacaagatggacgcgaatacagggaatctcagtgatgcaactaaaaccctttgcgacgatcaacatgagaaagttccttaagtggttgttctgaaacttcaacgctttcttctcatcccgttggcagtgcttgaatttcgaatctaatctttgcccaaccggtgttggcgtccagcagatgaattgctgggggaaaacctcaattagtagaaagcatcaggtttcatctaggtattgactcgtcgtgatactgcgttgtaagtgtagcgagctcaacgaccacaagcatgtcaactggtatggcgttctggtgtggttgtgtgtgtgtgtgtatatatatatatcaagataaaggtaatggatttttgtatagttagttcaagttcatcttgtaaaaaaaaaaaa

SEQ ID NO: 124 - protein, 323 aa, Malus x domestica
MVSKNPNPPEGLYLDPNESGMPLPGLGPFASATATTSTTSSSAEDLSKKIRKPYTITKSRESWSEPEHDKFLEALQLFDRDWKKIEAFIGSKTVIQIRSHAQKYFLKVQKNGTSEHLPPPRPKRKAAHPYPQKASKNALALPPVSWSCQSSSALLESGFNQRPDSSSMLMSPIPGPVAPSWPNGSVQTANPSHESKVVSGPTVLNNSCSTTESTPKAQPVGGTTDQVNHSHALRVLPDFTQVYGFIGSVFDPNVTGHLQNLKKMDPIDVETVLLLMRNLSMNLTNPEFEDHRQLLSSYKMDANTGNLSDATKTLCDDQHEKVP

SEQ ID NO: 125 - DNA, 1419 bp, Triticum aestivum
gcacgagcccaacccggcccccggcgccacaccgcgacgcgacgcgacgcagccaccacgcaggcggacgcggccgagctacggacaaaagcctccctctccatcccccggtccagcgagcgagagaccgccaccggcaccggcacccaacgggacctggcacgccgcgcgccctctggcctccgtgcgtcccccatggtctccacgaacccgccgccgccgccggcgctgtccgaggcggccgccgccgtgtcgggcgacgacgccagcaagaaggtgcggaagccctacaccatcaccaagtcgcgcgagagctggacggagcaggagcacgacaagttcctcgaggccctgcagctctttgatcgtgactggaaaaagatagaagcttttgttggttcgaagactgtcatccagataaggagccatgcacagaagtattttttgaaggttcagaaaaatggaaccagcgaacatgtcccacctccacgaccgaagcgtaaagctgcccacccataccctcagaaggcctccaaaaatgagccaggatatgccctgaagacagatccatctgccatgcttagaaattcaggaatgaacgtggctgtttctccatggacccacaattctatcccaccagttgtcgcctcatctttcatgaaagaagatttaggtgctgggtctatgggtccaaacattttttgctcaagcagtagtgaaggccctccaagggcatggcaatctggtgaaaccaatgaccagataaatcaagttccatcactccgcattatgccagattttgcacaagtatacagcttcttaggcagtgttttcgatccaagcacaaagggccatttgcagaaactgaaggagatgaatccaattgatgttgaaacagcactgttgttaatgagaaatctctccatcaacttgaccagtcctgattttgaagatcaaaggaagttgctgtcttcgtacaattccacctctgatgggctagagctagggagctccagaagctcacttcttacggataatgcattgagccttttttgatagttcatgattaaaggcagatggtgccgcctatagtttcatctcgatctctgaatagggggttttcctggagcacccatgaaggcgctttcaccattgtatttctagctagcttcgaaccgtagaatgtgtaagggtgcaaccatgtacagtaggcttccataaggtgagatctgtctatagcctgatgtgtatatattttcgccccgaagcgtgtatctttcctcccccgataccttggccatcaaggtgcatggatgttgcttcagtcaaagcttgaaagtgctgtccttggtgatggtaaatggaaaggaaattttgagtaatgctggttactcccttttcaaaaaaaaaaaaaaaaaa

SEQ ID NO: 126 - protein, 286 aa, Triticum aestivum
MVSTNPPPPPALSEAAAAVSGDDASKKVRKPYTITKSRESWTEQEHDKFLEALQLFDRDWKKIEAFVGSKTVIQIRSHAQKYFLKVQKNGTSEHVPPPRPKRKAAHPYPQKASKNEPGYALKTDPSAMLRNSGMNVAVSPWTHNSIPPVVASSFMKEDLGAGSMGPNIFCSSSSEGPPRAWQSGETNDQINQVPSLRIMPDFAQVYSFLGSVFDPSTKGHLQKLKEMNPIDVETALLLMRNLSINLTSPDFEDQRKLLSSYNSTSDGLELGSSRSSLLTDNALSLF

SEQ ID NO: 127 - DNA, 633 bp, Glycine max
gtcgctccccggaatccttcccttcgccgccgcagccaccgccaccgcagattcctttgaggaccctgctaagaagactcgcaagccttacactattaccaagtctagggagagttggaccgaacctgagcacgacaagttcctcgaagctcttcagttatttgaccgtgactggaaaaagattgaagcatttgttggatcaaagacagtcatccagatacgtagccatgctcagaaatactttctaaaagttcagaagagtgggacaaatgaacatcttcctccacccagaccaaaaagaaaagctgctcatccatatcctcagaaagcttcaaaaactggttatagtcttcactatattttttttttttgctacacaatttagtgcatttgtctctaataattgttggtgagatttggcagctccagtactctcacaagtatcaggatcctttcaatcttcatcagctttgcttgaacctggatacatattaaagcatgactcttcagcaatgcctaaaactcccattattaacactgcagtgtcttcctggtcaaacaactctctgcagaaaaccaccagcgtattgcatgggcaaaaacaaaaagtgaataattgttgcagtagcagta

SEQ ID NO: 128 - protein, 127 aa, Glycine max
SLPGILPFAAAATATADSFEDPAKKTRKPYTITKSRESWTEPEHDKFLEALQLFDRDWKKIEAFVGSKTVIQIRSHAQKYFLKVQKSGTNEHLPPPRPKRKAAHPYPQKASKTGYSLHYIFFFCYTI

SEQ ID NO: 129 - DNA, 646 bp, Glycine max
taaacttggacccctccggcatgtcgctccccggaatccttcccttcgccgccgcagccaccgccaccgcagattcctttgaggaccctgctaagaagactcgcaagccttacactattaccaagtctagggagagttggaccgaacctgagcacgacaagttcctcgaagctcttcagttatttgaccgtgactggaaaaagattgaagcatttgttggatcaaagacagtcatccagatacgtagccatgctcagaaatactttctaaaagttcagaagagtgggacaaatgaacatcttcctccacccagaccaaaaagaaaagctgctcatccatatcctcagaaagcttcaaaaactgctccagtactctcacaagtatcaggatcctttcaatcttcatcagctttgcttgaacctggatacatattaaagcatgactcttcagcaatgcctaaaactcccattattaacactgcagtgtcttcctggtcaaacaactctctgcagaaaaccaccagcgtattgcatgggcaaaaacaaaaagtgaataattgttgcagtagcagtagaagtcctagagcgcagttggttggtgaatctaatggtcaaaggaataacagccatccattgagagttcttcc

SEQ ID NO: 130 - protein, 215 aa, Glycine max
NLDPSGMSLPGILPFAAAATATADSFEDPAKKTRKPYTITKSRESWTEPEHDKFLEALQLFDRDWKKIEAFVGSKTVIQIRSHAQKYFLKVQKSGTNEHLPPPRPKRKAAHPYPQKASKTAPVLSQVSGSFQSSSALLEPGYILKHDSSAMPKTPIINTAVSSWSNNSLQKTTSVLHGQKQKVNNCCSSSRSPRAQLVGESNGQRNNSHPLRVLP

SEQ ID NO: 131 - DNA, 206 bp, Pisum sativum
  misc_feature (13)..(13): n is a, c, g, or t
  misc_feature (18)..(18): n is a, c, g, or t
tttacaaagcagngaganaggtggacagatgaagaacataagaagttccttgaagctttaaagctgtatggccgagcctggcgaaaaatcgaagaacatgttggcacaaagactgctgtgcagattcgaagtcatgctcagaagtttttttctaagatcaatcgagacactaatgggaacgatacgacattggtggagtcaattga

SEQ ID NO: 132 - protein, 68 aa, Pisum sativum
  UNSURE (5)..(6): Xaa can be any naturally occurring amino acid
FTKQXXRWTDEEHKKFLEALKLYGRAWRKIEEHVGTKTAVQIRSHAQKFFSKINRDTNGNDTTLVESI

SEQ ID NO: 133 - DNA, 1577 bp, Glycine max
  misc_feature (1573)..(1573): n is a, c, g, or t
gggacgagcaaatcgaaagacaagagtcacagcgcacccccaaacagaaacagagttattgggagcacgaaacactaactgactcgattcgattgaggttacaaaacactaaactgattcgattcgattcgattgaggtttcggtttggtcttgatggtgtcggtgaacccaagccctgctcaaggcttctacttcttcgatccctccaacatggtccttcccggcgtcaacaatcttccaccgcccccgccgcctgctccgccttctcacgccgccgtggaggatccgagtaagaagatcaggaaaccctacacgattaccaagtccagggagagctggactgagcaggagcacgacaagtttctagaagctctccaattatttgatcgggactggaaaaagattgaagcatttgttggttcaaaaacagttatccagatacgaagtcatgcacagaagtattttcttaaagttcagaagaagggaacaagtgaacatgtacctcctccccggccaaagagaaaagctgctcgcccataccctcaaaaagctcctaaaactcctactgtatcccaagttatgggcccattgcaatcttcatcttctttcattgaacctgcatacatttatatcccggattcttcatctgcgcttggaactccagttactaacatgccttcgtcatcttggaactataataatacaccacaatctgtcaatgtgccacaagtgaccagagatgacatgggattcactgtagctggacaaacagctcctcttaattgttgctgcagcagtagtaatgagagcacccctccaacttggccaagtagcaaaaggactaatcaaggtgaccaggagccaattaaagtaatgccagattttgcacaagtctacagcttcatcggcagtgtattcgatccaaattcaactaatcacctacagaaactacgacagatggatccattaaatgtggaaacgatattgttgttgatgagaaatctctccatcaatttaatgagtcctgaatttgaggatcacaagaggctgctttcttcatatgacaccgactctgacaagtcgaagttggttaatatttgcagcaaatccctcactaataaatctgagagtgctgttttgtctgcttaggatgtggccagtggtttgccctcaatatattttctgaatgcacataaagtgggagcaagaaggggagaagacataggttttgctaaaaggaagtgtagtatctagatgcttgcaagttgaatgtgtatataactatatataaatatatgtatacattttggattgagtttttgtttgttttaggcactgttagatcgtagatatgctggtgtgtttggtgtatatctttcgaagatatgatgattgtccttggaatgcaggacaatgagagtcctgttaggtcacttctggaggctatactgtacagtctgttgagtgcttttgtttattatgctgtgaagcataggattagtataaaagagtggtgttaggacttaggggtgccgcgttgtatatataaagcaataaaacagtgcagataantttc

SEQ ID NO: 134 - protein, 331 aa, Glycine max
MVSVNPSPAQGFYFFDPSNMVLPGVNNLPPPPPPAPPSHAAVEDPSKKIRKPYTITKSRESWTEQEHDKFLEALQLFDRDWKKIEAFVGSKTVIQIRSHAQKYFLKVQKKGTSEHVPPPRPKRKAARPYPQKAPKTPTVSQVMGPLQSSSSFIEPAYIYIPDSSSALGTPVTNMPSSSWNYNNTPQSVNVPQVTRDDMGFTVAGQTAPLNCCCSSSNESTPPTWPSSKRTNQGDQEPIKVMPDFAQVYSFIGSVFDPNSTNHLQKLRQMDPLNVETILLLMRNLSINLMSPEFEDHKRLLSSYDTDSDKSKLVNICSKSLTNKSESAVLSA

SEQ ID NO: 135 - DNA, 786 bp, Glycine max
acgagggacgagcgaaacccaagacaagaatcacagcgcacagtgacacatacataaaaaaacgaaacacaaacagaaacagagttattgggaaacacgaaacactaattgattcgaattcgattcgattgaggattgctgtttgggtgtcttgatggtgtcggtgaacccaaaccccgctcaaggcttctacttcttcgatccctccaacatgacccttcccggcgtcaacaatcttccaccgccgccgccgccggctccggctgctccctccgccgtcgaggatccgaataagaagatccggaaaccctacacgattaccaagtccagggagagctggaccgagcaggagcacgacaagtttctagaagctctccaattatttgatcgggactggaaaaagattgaagcatttgttggttcaaaaacagttatccagatacgaagtcatgcacaaaagtattttcttaaagttcagaagaatggaacaagtgaacatgtacctcctcctcggccaaagagaaaagctgctcacccataccctcaaaaagctcctaaaactcctactgtatcccaagttatgggcccattgcaatcttcatctgctttcattgaacctgcatacatttatagcccagattcttcatctgtgcttggaactccagttactaacatgcctttatcatcttggaattataatactacaccacaaccaggcaatgtgccacaagtgaccagagatgacatgggattgactggagctggacaagctgctcctcttaattg

SEQ ID NO: 136 - protein, 210 aa, Glycine max
MVSVNPNPAQGFYFFDPSNMTLPGVNNLPPPPPPAPAAPSAVEDPNKKIRKPYTITKSRESWTEQEHDKFLEALQLFDRDWKKIEAFVGSKTVIQIRSHAQKYFLKVQKNGTSEHVPPPRPKRKAAHPYPQKAPKTPTVSQVMGPLQSSSAFIEPAYIYSPDSSSVLGTPVTNMPLSSWNYNTTPQPGNVPQVTRDDMGLTGAGQAAPLN

SEQ ID NO: 137 - DNA, 587 bp, Glycine max
  misc_feature (420)..(420): n is a, c, g, or t
  misc_feature (529)..(529): n is a, c, g, or t
atgcactagagaagggtgagaaagggaaggaagagcctgaaacacctgatgctaaccaattagccattgactttagtaatcgtcgtagaagtgttagcaatcttactgattcttggaaagaggtctctgaagaggggagactggcctttcaggctctattctccagagaggtgttgcctcaaagcttttcacctcctcatgctttgaagaataagaatcagcaaatggacaacgccaataataacaagcaaaacatagaaaataacgagggactgttaaccatagggcttggacaaggaaagcttaagactcgtcgaacaggctttaaaccctacaaaagatgttccatggaggccaaggaaaatagggttggagcgagcaacaatcaaggtgaagagcaaggttgtaagagaatacgtntggaaggggagacttcgacttgaggtttgatatatgcagtaacataaatgcaacctttgggttttacatgtcatttcttaatccccccacaacggtgtaactatattgnttatttctaattctgcagctcaccgaaactgtcgtgtagatgtggtgtccattttgaa

SEQ ID NO: 138 - protein, 146 aa, Glycine max
  UNSURE (140)..(140): Xaa can be any naturally occurring amino acid
ALEKGEKGKEEPETPDANQLAIDFSNRRRSVSNLTDSWKEVSEEGRLAFQALFSREVLPQSFSPPHALKNKNQQMDNANNNKQNIENNEGLLTIGLGQGKLKTRRTGFKPYKRCSMEAKENRVGASNNQGEEQGCKRIRXEGETST

SEQ ID NO: 139 - DNA, 1187 bp, Glycine max
ctgcttcccacgccacatcgttctccctctccctccctctctctctctctctctctctctctctctctctaagctctttcttgttgaaactgtgagtctatgttatttgtggcggagcatgaactccaccaccaacacttcgaattctcagtcaatggctgcagcagcaccgagtgatggttctgggaagaaggtaagaaagccttacaccataaccaagtccagagagagttggactgaggaagaacatgataagtttctcgaagctctccaactatttgacagggactggaagaaaattgaagattttgtaggttcaaaaacagttattcagattcgaagccatgcccagaaatacttcttgaaagttcaaaagaatgggactgtggcacatgtgcctcctccccgtccaaagcgcaaagctgctcatccttacccgcaaaaggcatcaaaaaatgttttggtgccactaccagcttccattggttatgcttcatcgagaaatacgcttgcacctgggtttgcctcatgggatgaaacttccctgctgatgaatgctggagccgataaacccatgacctgtcaggatgaactcaacaatcttcatcatggaaatgaagctgatattggatcaaaggggatagcacagattaccaacagcagtctcagtggtgttggaaattctactagaacactactgacttctgagataccaaagcaagggaaacaagctccagtgcttcatggtttgccagattttgctgaagtttacggtttcattggaagtgtatttgatccagaaacaaatgaccatgtccagaagctgaaggaaatggatcctataaattttgaaactgttttgttgctaatgagaaacctcactgtcaacttgtctagccctgacttcgaacccatttgatagaatggggagacatcccaatactactgggcaaggcgccaatgacccacccaaaagattactgcacaagcttaaaccacaagtaatttgacaactactcaattagtacctagacgtcaagggatctctctgagaaggccccagagtgttctctttttctaattacatgtgaatgacgtgataggatttccatgtaataaatataggctcttgtattaatttgtgattagccccggattacttgaaaaattaaagtatttattagata

SEQ ID NO: 140 - protein, 266 aa, Glycine max
MNSTTNTSNSQSMAAAAPSDGSGKKVRKPYTITKSRESWTEEEHDKFLEALQLFDRDWKKIEDFVGSKTVIQIRSHAQKYFLKVQKNGTVAHVPPPRPKRKAAHPYPQKASKNVLVPLPASIGYASSRNTLAPGFASWDETSLLMNAGADKPMTCQDELNNLHHGNEADIGSKGIAQITNSSLSGVGNSTRTLLTSEIPKQGKQAPVLHGLPDFAEVYGFIGSVFDPETNDHVQKLKEMDPINFETVLLLMRNLTVNLSSPDFEPI

SEQ ID NO: 141 - protein, 18 aa, Artificial sequence
  motif 1
  VARIANT (2)..(2): Xaa is Thr or Ser
  VARIANT (3)..(3): Xaa is Glu, Asp, Ala, Pro, Thr or Arg
  VARIANT (4)..(4): Xaa is Gly, Glu, Pro, Gln, Asp, Ala, Asn or Tyr
  VARIANT (6)..(6): Xaa is His or Gln
  VARIANT (7)..(7): Xaa is Asp, Glu, Asn, Arg, Lys, Gln, Ala or Ser
  VARIANT (8)..(8): Xaa is Lys, Arg, Leu, Met, Thr, Asn or Gln
  VARIANT (10)..(10): Xaa is Leu, Ile, Val, or Met
  VARIANT (11)..(11): Xaa is Glu, Asp, Gln, Ile, Leu, Val, Met, Thr, Ala, Arg or His
  VARIANT (12)..(12): Xaa is Ala, Ser or Gly
  VARIANT (13)..(13): Xaa is Leu, Ile or Met
  VARIANT (14)..(14): Xaa is Gln, His, Ile, Lys, Arg, Ser, Asp, Glu or Asn
  VARIANT (15)..(15): Xaa is Leu, Met, Lys, Arg, Gln, Val or Thr
  VARIANT (16)..(16): Xaa is Phe, Tyr, His, Val or Leu
  VARIANT (17)..(17): Xaa is Asp or Gly
  VARIANT (18)..(18): Xaa is Arg, Lys or Glu
WXXXEXXXFXXXXXXXXX

SEQ ID NO: 142 - protein, 19 aa, Artificial sequence
  motif 2
  VARIANT (1)..(1): Xaa is Phe, His, Tyr, Cys or Leu
  VARIANT (2)..(2): Xaa is Val or Ile
  VARIANT (3)..(3): Xaa is Gly, Ala, Lys, Thr, Val, Ser or Arg
  VARIANT (4)..(4): Xaa is Ser or Thr
  VARIANT (5)..(5): Xaa is Lys or Arg
  VARIANT (6)..(6): Xaa is Thr, Asn or Ser
  VARIANT (7)..(7): Xaa is Val, Thr, Ala, Pro or Ser
  VARIANT (8)..(8): Xaa is Ile, Val, Thr, Met, Arg, Glu or Ala
  VARIANT (10)..(10): Xaa is Ile or Val
  VARIANT (11)..(11): Xaa is Arg, Ala or Ser
  VARIANT (12)..(12): Xaa is Ser or Met
  VARIANT (13)..(13): Xaa is His or Tyr
  VARIANT (14)..(14): Xaa is Ala or Tyr
  VARIANT (15)..(15): Xaa is Gln or Asp
  VARIANT (16)..(16): Xaa is Lys, Tyr or Asn
  VARIANT (17)..(17): Xaa is Tyr, His or Phe
  VARIANT (18)..(18): Xaa is Phe, Lys or Cys
  VARIANT (19)..(19): Xaa is Leu, Thr, Ser, Ala, Ile, Arg or His
XXXXXXXXQXXXXXXXXXX

SEQ ID NO: 143 - protein, 6 aa, Artificial sequence
  motif 3
  VARIANT (3)..(3): Xaa is Pro or Gln
  VARIANT (4)..(4): Xaa is Arg, Tyr or Leu
  VARIANT (5)..(5): Xaa is Pro or His
  VARIANT (6)..(6): Xaa is Lys, Arg or Pro
PPXXXX

SEQ ID NO: 144 - protein, 11 aa, Artificial sequence
  motif 4
  VARIANT (7)..(7): Xaa is Ser or Thr
ATVAAAXAWWA

SEQ ID NO: 145 - protein, 9 aa, Artificial sequence
  motif 5
  VARIANT (5)..(5): Xaa is Cys or Ser
DRSSXGSNT

SEQ ID NO: 146 - DNA, 2193 bp, Oryza sativa
aatccgaaaagtttctgcaccgttttcaccccctaactaacaatatagggaacgtgtgctaaatataaaatgagaccttatatatgtagcgctgataactagaactatgcaagaaaaactcatccacctactttagtggcaatcgggctaaataaaaaagagtcgctacactagtttcgttttccttagtaattaagtgggaaaatgaaatcattattgcttagaatatacgttcacatctctgtcatgaagttaaattattcgaggtagccataattgtcatcaaactcttcttgaataaaaaaatctttctagctgaactcaatgggtaaagagagagattttttttaaaaaaatagaatgaagatattctgaacgtattggcaaagatttaaacatataattatataattttatagtttgtgcattcgtcatatcgcacatcattaaggacatgtcttactccatcccaatttttatttagtaattaaagacaattgacttatttttattatttatcttttttcgattagatgcaaggtacttacgcacacactttgtgctcatgtgcatgtgtgagtgcacctcctcaatacacgttcaactagcaacacatctctaatatcactcgcctatttaatacatttaggtagcaatatctgaattcaagcactccaccatcaccagaccacttttaataatatctaaaatacaaaaaataattttacagaatagcatgaaaagtatgaaacgaactatttaggtttttcacatacaaaaaaaaaaagaattttgctcgtgcgcgagcgccaatctcccatattgggcacacaggcaacaacagagtggctgcccacagaacaacccacaaaaaacgatgatctaacggaggacagcaagtccgcaacaaccttttaacagcaggctttgcggccaggagagaggaggagaggcaaagaaaaccaagcatcctcctcctcccatctataaattcctccccccttttcccctctctatataggaggcatccaagccaagaagagggagagcaccaaggacacgcgactagcagaagccgagcgaccgccttcttcgatccatatcttccggtcgagttcttggtcgatctcttccctcctccacctcctcctcacagggtatgtgcccttcggttgttcttggatttattgttctaggttgtgtagtacgggcgttgatgttaggaaaggggatctgtatctgtgatgattcctgttcttggatttgggatagaggggttcttgatgttgcatgttatcggttcggtttgattagtagtatggttttcaatcgtctggagagctctatggaaatgaaatggtttagggtacggaatcttgcgattttgtgagtaccttttgtttgaggtaaaatcagagcaccggtgattttgcttggtgtaataaaagtacggttgtttggtcctcgattctggtagtgatgcttctcgatttgacgaagctatcctttgtttattccctattgaacaaaaataatccaactttgaagacggtcccgttgatgagattgaatgattgattcttaagcctgtccaaaatttcgcagctggcttgtttagatacagtagtccccatcacgaaattcatggaaacagttataatcctcaggaacaggggattccctgttcttccgatttgctttagtcccagaattttttttcccaaatatcttaaaaagtcactttctggttcagttcaatgaattgattgctacaaataatgcttttatagcgttatcctagctgtagttcagttaataggtaatacccctatagtttagtcaggagaagaacttatccgatttctgatctccatttttaattatatgaaatgaactgtagcataagcagtattcatttggattattttttttattagctctcaccccttcattattctgagctgaaagtctggcatgaactgtcctcaattttgttttcaaattcacatcgattatctatgcattatcctcttgtatctacctgtagaagtttctttttggttattccttgactgcttgattacagaaagaaatttatgaagctgtaatcgggatagttatactgcttgttcttatgattcatttcctttgtgcagttcttggtgtagcttgccactttcaccagcaaagttc

SEQ ID NO: 147 - DNA, 56 bp, Artificial sequence
  primer: prm07263
ggggacaagtttgtacaaaaaagcaggcttaaacaatggagacaaattcgtctgga

SEQ ID NO: 148 - DNA, 53 bp, Artificial sequence
  primer: prm07264
ggggaccactttgtacaagaaagctgggtgaaaatagagtctcatgtggaagc

SEQ ID NO: 149 - DNA, 1496 bp, Arabidopsis thaliana
atggccacaacgatgacacgtgtctccgtcggcgtcgtcctctttgttctcttagtctcgctggttgccgtctccgccgcgagaagcggtcctgatgatgttatcaaactcccttcgcaggcttctcgcttcttccgtcctgctgaaaacgacgacgattctaactccggtactaggtgggctgttctagtcgccggatctagcggatattggaattacaggcatcaggctgatatatgccatgcctatcaacttctgaggaaaggtggattgaaagaggagaatattgtggtattcatgtatgatgatattgctaacaattacgagaatccaaggcctggaaccattatcaacagccctcatggaaaagatgtctatcaaggagttcccaaggattatactggagatgatgtcaatgttgataatctatttgctgtgatccttggagacaaaactgctgttaaagggggaagtgggaaggttgtggatagtggtcctaatgatcatatcttcatattctacagtgaccatggtggtcctggagttcttgggatgccaacttctccttacctatatgcaaatgatctcaatgatgtcttgaagaagaaacatgctttaggaacatataaaagcttggtgttttatctcgaagcttgcgaatctggaagtatctttgaagggcttcttcctgagggtttgaacatctatgccacaactgcatcaaacgccgaagaaagcagttggggtacctattgccctggagaggaacccagtcctccaccggagtatgaaacttgtttaggtgacttgtacagtgttgcttggatggaagatagtggtatgcacaatttacagactgagactctgcaccagcaatatgaacttgtgaaaaggaggactgcacctgttgggtactcttatggttctcatgtcatgcaatatggcgatgtaggaattagcaaggataatctcgatctttatatgggaacaaaccctgccaatgacaattttacctttgcggatgcgaattcactaaagccaccttcaagagttacaaaccagcgtgatgcagatcttgttcatttttgggaaaagtaccgaaaagcaccagaaggttcagcaagaaaaacagaagctcagaagcaagtacttgaagccatgtctcacagacttcatattgacaatagcgtgatactcgtcggaaaaatcttgtttggcatttcgagaggtcctgaagtgctaaacaaagtacggtctgctgggcaacctctagtcgatgactggaactgccttaaaaatcaggtgagagctttcgagaggcactgtggatcgctgtctcagtacggtatcaagcacatgaggtcttttgcaaacatctgcaatgcagggattcaaatggagcaaatggaggaggcagcttcacaggcttgtaccacactgccaactggtccttggagctcgcttaaccgtggattcagtgcatagaaaccctaaac

SEQ ID NO: 150 - protein, 494 aa, Arabidopsis thaliana
MATTMTRVSVGVVLFVLLVSLVAVSAARSGPDDVIKLPSQASRFFRPAENDDDSNSGTRWAVLVAGSSGYWNYRHQADICHAYQLLRKGGLKEENIVVFMYDDIANNYENPRPGTIINSPHGKDVYQGVPKDYTGDDVNVDNLFAVILGDKTAVKGGSGKVVDSGPNDHIFIFYSDHGGPGVLGMPTSPYLYANDLNDVLKKKHALGTYKSLVFYLEACESGSIFEGLLPEGLNIYATTASNAEESSWGTYCPGEEPSPPPEYETCLGDLYSVAWMEDSGMHNLQTETLHQQYELVKRRTAPVGYSYGSHVMQYGDVGISKDNLDLYMGTNPANDNFTFADANSLKPPSRVTNQRDADLVHFWEKYRKAPEGSARKTEAQKQVLEAMSHRLHIDNSVILVGKILFGISRGPEVLNKVRSAGQPLVDDWNCLKNQVRAFERHCGSLSQYGIKHMRSFANICNAGIQMEQMEEAASQACTTLPTGPWSSLNRGFSA

SEQ ID NO: 151 - DNA, 1637 bp, Triticum aestivum
  misc_feature (14)..(14): n is a, c, g, or t
ggcggcagagcagnctgactgaagcagagagcagcagttcaccatggctcgcctttcctgctcacccctcctcctcctcctcttcttgtcgtcgcagctcgccctgctcgtcgccggcgagttcctccgcctgccgtccgagaaggacgtcgtcgggacgagatgggccgtcctcatcgccggctccaacggctactacaactaccgccaccaggcggacgtatgccacgcgtaccagatcatgaagaagggcgggctgaaggacgagaacatcatcgtcttcatgtacgacgacatcgccggcaaccgcgacaaccccaggcctggggtcatcatcaaccaccccaaaggcggcgacgtctacgccggagtccccaaggactacacgggggcagacgtcaacgccaacaacttcctcgccgcgctgctcggcgacaagtccaagctcaccggcagcggcagcggcaaggtcgtcagcagcggcccggacgaccacatcttcgtctattacgccgatcacggtggcccagggatccttgggatgccgggcgacgaggagtacctgtacgcgaacgacctggtgcggacgctggagaagaagcacgccggcggggccgggtataagagcctggtcttctacctggagggcctgcgagtccgggagcatcttcgagggcctcctcccgggcaacatcagcgtgtacgccaccacggcggccaacgcggaggagagcagctggggcacctactgccccggcgacgacgagggcgccccgccgccggagtacgacacctgcctcggcgacctctacagcgtcgcctggatggaggacagcgacgcgcacaacctcaacgccgagtcccttaagctgcagtacgagcgggtcagggaccggacgtcggcgggcggcacgtacagcctcggctcccacgtcatgcagtacggcgacctgggcctcaacgaccagagcctcttcgtctacatcggcaccaaccctgccaacgacaacgcctccttcgtccagggctcctcctcgacctccaggcagctgccgggcggcggagtgaaccagcgggacgccgacctcgtccacttctggcacaagtaccggagtcggcggaggggtcggccgagaaaggcgaggcgcggaggcggctggtggagacgatggcgcggcggtctcgcgtggacagcagcgtggagctcatcggcggcctcctcttcggctcagaggaaggtgccaaggtcctcggcgccgtgcggccggcggggcagcctgtggtggatgactgggactgcctcaagtctgtggtgcggacgttccagcagcggtgcgggccgctgacgcagtacgggatgaagcacatgcgctcgctcgccaacctctgcaacgccggcgtccgggaggaggccatggacaaggctgcggctcaggcgtgcgctgctaatccttcctccttgttctgatcaaactgtgtgatcgatccatgtcgcatcggtcacctaaaatatggtgtgatggatcgatctatacggtcgtgattgctgtaaatactaatacatgctgcacagcaagtacgtgattgctgtaaatactatgtgctattatttgctatacaaagaaaatagctctctc

SEQ ID NO: 152 - protein, 474 aa, Triticum aestivum
  UNSURE (275)..(275): Xaa can be any naturally occurring amino acid
MARLSCSPLLLLLFLSSQLALLVAGEFLRLPSEKDVVGTRWAVLIAGSNGYYNYRHQADVCHAYQIMKKGGLKDENIIVFMYDDIAGNRDNPRPGVIINHPKGGDVYAGVPKDYTGADVNANNFLAALLGDKSKLTGSGSGKVVSSGPDDHIFVYYADHGGPGILGMPGDEEYLYANDLVRTLEKKHAGGAGYKSLVFYLEGLRVREHLRGPPPGQHQRVRHHGGQRGGEQLGHLLPRRRRGRPAAGVRHLPRRPLQRRLDGGQRRAQPQRRVPXAAVRAGQGPDVGGRHVQPRLPRHAVRRPGPQRPEPLRLHRHQPCQRQRLLRPGLLLDLQAAAGRRSEPAGRRPRPLLAQVPESAEGSAEKGEARRRLVETMARRSRVDSSVELIGGLLFGSEEGAKVLGAVRPAGQPVVDDWDCLKSVVRTFQQRCGPLTQYGMKHMRSLANLCNAGVREEAMDKAAAQACAANPSSLF

SEQ ID NO: 153 - DNA, 1723 bp, Triticum aestivum
ggcgcctactttaccccgcaccccgcgccgctcttctcgcccgtacgttccggctcccccgcgcggtgctcttagacagtagtgctactgcgacctcacctgcgcagacggatggcgccgcggtggtgcttcgcgttgctcctgctgctgtgtgcggcggccggggctgacgcctcgaaggggaagtgggacccggtgatccggatgccgggggaggaggagcccgccacgggcgacgagagctccgagaagggggaggacggcgtcgggacgaggtgggcggtgctcgtcgccggatcctccggctacggaaactacaggcaccaggccgatatatgccatgcctaccagatattgagaaaagggggcgtaaaagaggagaacatcgtggtttttatgtatgatgacattgccaacaaccctctcaacccgaggccaggggttatcatcaaccacccagagggcgaagatgtatatgctggcgttccaaaggactacaccggagaggcagttactgctaagaacttctatgcagttctcttgggcaacaaaactgcggtcactggagggagtaagaaggtcatagatagcaaaccaaatgaccatatatttatctactactcagatcacgggggtcccggagtccttggtatgcccaacctgccatatctctatgctgctgattttatcaaggtcttacaagaaaaacatgcatccaatacctatgcaaaaatggttatatatgtggaagcttgtgaaagtggcagtatttttgagggtttgatgcctgcagacctcaatatttatgtcacaacagcatctaatgcagaagaaagcagctggggtacatactgcccaggaatggaaccatcgcctccttctgagtatattacctgcttaggtgatctctacagtatttcttggatggaagacagtgagactaataatctgaaggaggagacaatcaagaagcagtatgaagtggtaaagaagcgaacctcagacatgaacagctatagtgccggttctcatgttatggagtatggcgacaagaccttcaaggatgagaagctttacctttatcaaggtttcaatcctgcaaacaccaacattacaaacaagctatttttgcaagcccaaaggctgcaatcaaccaaagagacgcagatcttcttttcttgtggaggaggtatgagctgctacatgaaaagtcgaaagagaagacgaacgttctgagggagatcagtgagacagtcacccacaggaagcatcttgacagcagcatcgattttattgggaagcttctatttggcttcgagaatggaccttcggtgcttcaagctgtcagaccttctgggaagcctctagtggacgactgggattgcctgaagaggatggtgcggatctttgagtctcattgcggatcgctcactcagtacggtatgaagcacatgcgagcatttgcaaatatatgcaacaatggtgtttctggcacgacgatgaaggaagcaagcatcaatacctgcggcggtcacaactcggcaagattgagcaccttgatccaagggtacagcgcttgatcgatcagtctgctgaggtacatactagtatgttccttgtcctcagcttacgcgaatgtgaatatgtagtattgtattgtattgtactgttagtgtatcctgaaaataaccttggggccggctatataagaatgtgcctatgt

SEQ ID NO: 154 - protein, 374 aa, Triticum aestivum
MAPRWCFALLLLLCAAAGADASKGKWDPVIRMPGEEEPATGDESSEKGEDGVGTRWAVLVAGSSGYGNYRHQADICHAYQILRKGGVKEENIVVFMYDDIANNPLNPRPGVIINHPEGEDVYAGVPKDYTGEAVTAKNFYAVLLGNKTAVTGGSKKVIDSKPNDHIFIYYSDHGGPGVLGMPNLPYLYAADFIKVLQEKHASNTYAKMVIYVEACESGSIFEGLMPADLNIYVTTASNAEESSWGTYCPGMEPSPPSEYITCLGDLYSISWMEDSETNNLKEETIKKQYEVVKKRTSDMNSYSAGSHVMEYGDKTFKDEKLYLYQGFNPANTNITNKLFLQAQRLQSTKETQIFFSCGGGMSCYMKSRKRRRTF

SEQ ID NO: 155 - DNA, 1847 bp, Triticum aestivum
acgcgtccgttaaacccctccttcctcctccccctcgcttcttcgcggaatccaaaccccaaacaccagccatggcgatggcgtccttccgcccccttcccctcgctctcctgctcgccgcgtgcctctcggcgctcgtgctggccgtggcgcacgcgcggaccctacggctggagcccaccatccggctgccgtcgcagcgcgccgccgggcaggaggacgatgactccgtcgggaccaggtgggccgtcctcatcgccggctccaacggctactacaactaccgccaccaggcggatatctgccacgcctaccagatcatgaagaagggtggtctcaaggatgagaacatcatcgtattcatgtacgacgacattgcgcacaacccggagaacccgaggccgggcgtcatcatcaaccacccccagggtggagatgtctatgctggggtccctaaggactacactggaaaggaggttaatgtcaagaacttctttgctgtcctgctcggtaataaaaccgctgtgagtggtgggagcggcaaagtcgtggacagtggccctaatgatcacatttttgtgttttacagtgaccatgggggtcctggggtccttgggatgcctacctatccatacctttacggtgacgatcttgtagatgtcctgaagaaaaagcacgctgctggaacctacaaaagcctggtattttaccttgaagcctgcgaatctgggagcatctttgagggacttctgccgaatgacatcggtgtctatgcgaccaccgcatcgaacgcagaggaaagcagttggggaacgtattgccccggcgagtaccccagccctccgccggaatatgacacttgcttgggcgacctgtacagcatttcttggatggaagacagtgatgtccacaacctgagaactgaatctctcaagcagcaatatgacttggtcaagaagagaacagcagctcaggactcatacagctatggttcccatgtgatgcaatacggttctttggacctgaatgctcaacaattctttttgtacatcggctcaaatcctgctaacaataacactacatttgttgaagataactcactgccgtccttctcaagagctgttaatcagagggatgctgatcttgtttacttctggcagaagtaccggaaattggctgagagctcccctgagaaaaacgatgctcggaagcaattgcttgaaatgatgggtcatagatctcatattgacaacagcgtcgagctgattggaaaccttctgtttggttctgcggatggtccgatggttctaaagactgttcgcccagctggtgagcctcttgttgatgactggagttgtctcaagtctacggtgcgtacttttgaatcacaatgtggctcgctggcgcagtatggaatgaagcacatgcggtcctttgcaaacatctgcaatgccggcattgttcctgaagcgatggcaaaggttgctgctcaggcgtgcacgagcatcccaaccaacccctggagtgccacacacaagggttttagtgcttaaaccagaggtgaagcaacttggtccctatctcagctattgtaccatataccaaagtcccttcctattcacacagggttagtagtgcttgaaccaacgaaccttagatgaataagaattatgccattatttcagctattccaccacaccaaattaccttggctgtgtccaacttataatgtacatatacccgtagtagaaaggtgatttcctgtgattgctgtacatactcgtgatagttcgtgatcagatgtgtagctctcaattccatatacgaatgcaatcactgctatttgt

SEQ ID NO: 156 - protein, 493 aa, Triticum aestivum
MAMASFRPLPLALLLAACLSALVLAVAHARTLRLEPTIRLPSQRAAGQEDDDSVGTRWAVLIAGSNGYYNYRHQADICHAYQIMKKGGLKDENIIVFMYDDIAHNPENPRPGVIINHPQGGDVYAGVPKDYTGKEVNVKNFFAVLLGNKTAVSGGSGKVVDSGPNDHIFVFYSDHGGPGVLGMPTYPYLYGDDLVDVLKKKHAAGTYKSLVFYLEACESGSIFEGLLPNDIGVYATTASNAEESSWGTYCPGEYPSPPPEYDTCLGDLYSISWMEDSDVHNLRTESLKQQYDLVKKRTAAQDSYSYGSHVMQYGSLDLNAQQFFLYIGSNPANNNTTFVEDNSLPSFSRAVNQRDADLVYFWQKYRKLAESSPEKNDARKQLLEMMGHRSHIDNSVELIGNLLFGSADGPMVLKTVRPAGEPLVDDWSCLKSTVRTFESQCGSLAQYGMKHMRSFANICNAGIVPEAMAKVAAQACTSIPTNPWSATHKGFSA

SEQ ID NO: 157 - DNA, 1790 bp, Triticum aestivum
ctacgaatatgaggcgctgcgcctgccgtccgcggagcagaactgccaggcgatcgacgatcacactttacctcctgcgcgcactgcacgccgacgcgagtataaaatgcgggcccagcccccgccggaacgatcacacttcactctctgccttctcttcctttctaggctctagcacacgcacatgatgaactcgagggtggcgatggctgcgtggtgggtttgtggactcctcccgctcctggcggaggcggccaaggggaactcggagccgctgatccggctgccgacggagaatgggcatgcccctgcccctgcgcctggccctgccgcgtcggcggcggaggaagaggtgacgaagtgggccgtgctcgttgccggctcctccggctacgagaactaccggcaccaggccgatgtgtgccacgcgtaccagatcctgaagaaggggggactcaaggatgagaacattgtggtgtttatgtacgatgacatcgccaacagccctgacaacccaaggcgtggagccgtcatcaaccatcctaaaggcaaagatgtttaccatggtgttcccaaggactacaccggtgaccaggtcactgctaagaacttgtatgcggttctcctggggaacaaaaccgcggttaccggagggagtaggaaggtgataaacagcaaaccgaaggatcacatcttcatctactacacggatcatgggggtcctggttcacttggtatgcccaacgggccatatgtttatgctggcgacttcatcaaagtgttacggcaaaagcatgcttccaaaagctattcgaaaatggtcatatatgttgaagcgtgtgaaagtggcagcatctttgagggtttgatgccacaagatcacaatatttatgttacagcggcatcaaatgcggtagaaagtagctgggcagcatactgccctgatgatggaacgccacctcctcctgaatattttacctgtttaggtgacttatacagtgtttcttggatggaagacagtgaaactcaaaatctaaagaacgaaaccatcaagcagcagtacgaggtggttaaagcgagaacggcaccccgaaatgagtccattagaggttctcatgtcatggagtatggcgacaagactttcaaggaggacatgcttttcctctaccaaggtttcgatccggcgaagtcaagcatcagaaacaggccgctgcctatgcccagcctcaagggtgcaatcaagcaaagagatgccgatattctcttcatgtggaagaagtatgggaagttgaatgggggatcagaagagaagcagagggccctcagggaggtcaaagaaaccgtgctgcacaggaagcatctggacagcagtatcgatttcatcgggaagcttgtctttgggttcgacaaggggcctttggtgctcgaggctgctagaggctctggccagccattggtcgacgattgggattgtctgaagacgatggtgcgagtgttcgagtcccagtgcggatcactcactcagtacggcatgaaacacacgagggcgttcgcaaacatgtgcaacaatggcgtctccgaggccgagatgaaggaggcgagcatcagcgcttgcgacggctacgacatggggaggtggagcccgttggttcgaggctacagcgcctgatccgcttgcagtgcagtactactacatggcagcagcagcagccagagctccggagttcctagctagacctcgtatggtgtacatacacacattggtataccgtatacatacaagaaagaag

SEQ ID NO: 158 - protein, 494 aa, Triticum aestivum
MMNSRVAMAAWWVCGLLPLLAEAAKGNSEPLIRLPTENGHAPAPAPGPAASAAEEEVTKWAVLVAGSSGYENYRHQADVCHAYQILKKGGLKDENIVVFMYDDIANSPDNPRRGAVINHPKGKDVYHGVPKDYTGDQVTAKNLYAVLLGNKTAVTGGSRKVINSKPKDHIFIYYTDHGGPGSLGMPNGPYVYAGDFIKVLRQKHASKSYSKMVIYVEACESGSIFEGLMPQDHNIYVTAASNAVESSWAAYCPDDGTPPPPEYFTCLGDLYSVSWMEDSETQNLKNETIKQQYEVVKARTAPRNESIRGSHVMEYGDKTFKEDMLFLYQGFDPAKSSIRNRPLPMPSLKGAIKQRDADILFMWKKYGKLNGGSEEKQRALREVKETVLHRKHLDSSIDFIGKLVFGFDKGPLVLEAARGSGQPLVDDWDCLKTMVRVFESQCGSLTQYGMKHTRAFANMCNNGVSEAEMKEASISACDGYDMGRWSPLVRGYSA

SEQ ID NO: 159 - DNA, 1897 bp, Hordeum vulgare
gaattaaaccccttcctcctcccaattcgcgtcttcacggaatccaaaccccaaacaccatccatggcgatggcgtccttccgcctccttcctctcgcgctcctgctctccgtggcgcacgcgcggaccccacggcttgagcccaccatccggctgccgtcgcagcgcgccgccgggcaggaggacgatgactccgtcgggaccaggtgggccgtcctcatcgccggctccaacggctactacaactaccgccaccaggccgatatctgccacgcctaccagatcatgaagaagggtggtctcaaggatgaaaacatcatcgttttcatgtacgacgacattgcgcgcaacccagagaacccaaggccgggcgtcatcatcaaccacccccagggtggagatgtctatgctggggtccctaaggactacactgggaaggaggttaatgtcaagaacttctttgctgtcctgctcggtaataaaactgctgtgaatggtgggagcggcaaagtcgtggacagtggccctaatgatcacatttttgtgttttacagtgaccatgggggtcctggggtccttgggatgcctacctacccatacctttatggtgacgatcttgtagatgtcctgaagaaaaagcatgctgctggaacctacaaaagcctggtcttttaccttgaagcctgtgaatctgggagcatctttgaggggcttctgccgaatgatatcggtgtctacgcgaccaccgcatcaaacgcagaggagagcagttggggagcgtattgccctggcgagtacccgagccctccgccggaatatgacacttgcttgggcgacctatacagcatttcttggatggaagacagtgatgtccacaacctgaggactgaatctctcaagcagcagtataacctggtcaagaagagaacggcagctcaggactcatacagctatggttcccatgtgatgcaatacggttctttggacctcaatgctgaacatttgttctcgtacattgggtcaaatcctgctaacgagaacactacatttgttgaagataatgcattgccgtcgttatcaagagctgttaatcagagggatgctgatcttgtttatttctggcagaagtaccggaaattggctgagagctcccctgcgaaaaacaatgctcgtaagcaattgctcgaaatgatgggtcatagatctcatattgacagcagcgttgagctgattggaaaccttctgtttggttctgcgggtggtccaatggttctaaagactgttcgcccagctggtgagcctcttgtggatgactggagttgtctcaagtctacggtgcgtacttttgaatcccaatgtggctcgttggcgcagtatggaatgaagcacatgcggtcctttgcaaacatgtgtaatgccggcattgttcctgaagcgatggcaaaggttgctgctcaggcgtgcacgagcttcccaaccaacccgtggagtgccacacacaagggttttagtgcttaaaccagaggtgaagaagcaacgtaatcactatctcagctattgtaccatataccaaagtcccttcctattcacacagggttagtagtgcttgaacgagccttaggtgaataagaattatgctattatttcggctattccatcatactccctctgttcctaaatacttgttgttggggagaactctccccggcaacaaatattatggtacagagggagtagtaccaaattatacacttataatgtacatataccgtggtagaaaggtggtttcctgtgattgctgtacagactcatgatagtttgtgatgaaatgtgtagctcgcaattccatatatgaagaatgaatgcattcgctgctaaaaaaaaaaaaaaaaaaaaa

SEQ ID NO: 160 - protein, 484 aa, Hordeum vulgare
MAMASFRLLPLALLLSVAHARTPRLEPTIRLPSQRAAGQEDDDSVGTRWAVLIAGSNGYYNYRHQADICHAYQIMKKGGLKDENIIVFMYDDIARNPENPRPGVIINHPQGGDVYAGVPKDYTGKEVNVKNFFAVLLGNKTAVNGGSGKVVDSGPNDHIFVFYSDHGGPGVLGMPTYPYLYGDDLVDVLKKKHAAGTYKSLVFYLEACESGSIFEGLLPNDIGVYATTASNAEESSWGAYCPGEYPSPPPEYDTCLGDLYSISWMEDSDVHNLRTESLKQQYNLVKKRTAAQDSYSYGSHVMQYGSLDLNAEHLFSYIGSNPANENTTFVEDNALPSLSRAVNQRDADLVYFWQKYRKLAESSPAKNNARKQLLEMMGHRSHIDSSVELIGNLLFGSAGGPMVLKTVRPAGEPLVDDWSCLKSTVRTFESQCGSLAQYGMKHMRSFANMCNAGIVPEAMAKVAAQACTSFPTNPWSATHKGFSA

SEQ ID NO: 161 - DNA, 1853 bp, Glycine max
gggtaggagatactctcattcacctcccatcatcattataatcattcattccaacctacccttattcttcttcttcaatttcacacccatcatggaccgttttccgatcctctttctcgtcgccaccctcatcaccctcgcctccggtgcccgccacgatattctccggttaccctccgaagcttccaggttcttcaaagcacctgctaatgccgatcaaaacgatgagggcaccaggtgggccgttttagttgccggttccaatggctactggaattacaggcaccagtctgatgtttgccatgcatatcaactactgaggaaaggtggtgtgaaagaggaaaatattgttgtatttatgtatgatgacattgctttcaatgaagagaacccgcgacctggagtcattattaacagtccacatggaaatgatgtttacaagggagttcctaaggattacgttggtgaagatgttactgttgacaacttttttgctgctatacttggaaataagtcagctcttactggtggcagtgggaaggttgtggatagtggccccaatgatcatatatttatatactactctgatcatggcggtccgggagtgctagggatgcctactaatccatacatgtatgcatccgatctgattgaagtcttgaagaagaagcatgcttctggaacttataaaagcctagtattttatctagaggcatgtgaatctgggagtatctttgaaggtcttcttccagaaggtctgaatatctatgcaacaacagcttcaaatgcagaagaaagcagttggggaacatattgtcctggggagtatcctagtcctccctctgaatatgaaacctgcctgggtgacctgtacagtgttgcttggatggaagacagtgacatacacaatttgcaaacagaaactttacatcaacaatacgaattggtcaaacaaaggactatgaatggaaattcaatttatggttcccacgtgatgcagtatggtgacatagggcttagcgagaacaatctcgtcttatatttgggtacaaatcctgctaatgataattttacttttgtgcttaaaaactcattggtgccaccttcaaaagcagtcaaccaacgtgatgcagatctcatccatttttgggataagttccgcaaagctcctgtgggttcttctaggaaagctgcagctgagaaacaaattcttgaagcaatgtctcacagaatgcatatagatgacagcatgaaacttattggaaagctcttctttggcattgaaaagggtccagaactgcttagcagtgttagacctgctgggcaaccacttgttgatgactgggactgccttaaaacactggttaggacttttgagacacattgtggatctctgtctcagtatgggatgaaacatatgaggtcctttgcaaacttctgcaacgctggaatacggaaagagcaaatggctgaggcctcggcacaagcatgtgtcagtatccctgcaagttcctggagttctctgcacaggggtttcagtgcataattcctagaatccgctccattgaagacagagtatagtcgttgtaacattattctttacgagcgttatggactgtacctggacatgatttcttataccaaccctgtaaataagcatgggacgctggggaaacctctttacattatagtttcctgcaaaatagatgctgtaacaaagacattttacttttacttggggagaggcagtggaaccataaggacccttggaacttctaattaatacgacagggcacaataccgtgtttgtaagccaacgctttgtttcaatttaatggtaaccccgttgtgta

SEQ ID NO: 162 - protein, 484 aa, Glycine max
MDRFPILFLVATLITLASGARHDILRLPSEASRFFKAPANADQNDEGTRWAVLVAGSNGYWNYRHQSDVCHAYQLLRKGGVKEENIVVFMYDDIAFNEENPRPGVIINSPHGNDVYKGVPKDYVGEDVTVDNFFAAILGNKSALTGGSGKVVDSGPNDHIFIYYSDHGGPGVLGMPTNPYMYASDLIEVLKKKHASGTYKSLVFYLEACESGSIFEGLLPEGLNIYATTASNAEESSWGTYCPGEYPSPPSEYETCLGDLYSVAWMEDSDIHNLQTETLHQQYELVKQRTMNGNSIYGSHVMQYGDIGLSENNLVLYLGTNPANDNFTFVLKNSLVPPSKAVNQRDADLIHFWDKFRKAPVGSSRKAAAEKQILEAMSHRMHIDDSMKLIGKLFFGIEKGPELLSSVRPAGQPLVDDWDCLKTLVRTFETHCGSLSQYGMKHMRSFANFCNAGIRKEQMAEASAQACVSIPASSWSSLHRGFSA

SEQ ID NO: 163 - DNA, 2066 bp, Glycine max
gagagcaatgcttttcccggaaaaggagagagacataaaaaaagttccaagaaagaatcacagaattttcgcagaagcaggccaagaatacacgcatcccaaaccgttattaacgtgtcagcctctaaatttgcatggcatattgtctttaactgagtcaattccttaataaaccctctgctttaccaaccctgttctcactcattcacatactataatactacgatagcgtagactcttcccagttctgttgtgtgagtctgtgagtctttcttagctgatatggcggttgatcgctcccttacgaggtgctgtagcctcgtactgtggtcgtggatgttgctgaggatgatgatggcgcagggtgcagccgcgagggccaaccggaaggagtgggactcggtcataaagttaccggctgaaccggtcgatgctgactcggatcatgaagtgggaacacgatgggcggttcttgtggctggttcaaacggctatggaaactacaggcatcaagcagatgtgtgccatgcgtaccagttgctgataaaaggtgggctaaaagaagagaacatagtggtgtttatgtacgatgacatagctacagacgagttaaatcccagacctggagtcatcatcaaccaccctgagggacaagatgtgtatgctggtgttcctaaggattacaccggtgataatgtgacgacggagaacctctttgctgttattcttggagacaagagtaaattgaagggaggaagtggcaaagtgatcaacagcaaacccgaggacagaatatttatatactactctgatcatggaggtcctggaatacttgggatgccaaacatgccatacctttatgccatggattttattgatgtcttgaagaagaaacatgcatctggaagttacaaggagatggttatatacgtggaagcttgtgaaagtgggagcgtgtttgagggtataatgcctaaggatctgcagatttatgtcacaactgcatccaatgcacaagagaatagttggggaacttattgtcctggaatggatccttctccacctccagagtacatcacttgcctaggggatttgtacagtgttgcttggatggaagatagtgagactcataatctaaaaagggagtccgtgaaacaacaatacaaatcggtaaagcaacggacttcaaatttcaacaactatgcgatgggttctcatgtgatgcaatacggtgacacaaacatcacagctgaaaagctttatttataccaaggttttgatcctgccgctgtgaacttccctccacaaaacggaaggctagaaactaaaatggaagttgttaaccaaagagatgcagaacttttcttcatgtggcaaatgtatcagagatcaaaccatcagccagaaaagaagacagacatcctcaaacagatagcggagacagtgaagcataggaaacacatagatggtagcgtggaattgattggagttttattgtatggaccaggaaaaggttcttctgttctacaatccatgagggctcctggtcttgcccttgttgatgactggacatgcctaaaatcaatggttcgggtgtttgagactcactgtgggacactgactcagtatggcatgaaacacatgcgagcatttgccaacatttgcaacagtggcgtttctgaggcctccatggaagaggcttgtttggcagcctgtgaaggctacaatgctgggctattgcatccatcaaacagaggctacagtgcttgattttgggttttgtacacaaaagctttaaagcccggttgatgatgtaatatttctctattgcattctgcctactggtttctgctgcttgtgtcaaattttctctaaactagagtagcccaatagcatacgtgttatgtgcattggtcatgtatacaagtgtaatactaaaaccttctacataatataagattagttagtttggtttaaaaaaaaaaaagggtctgttgcaagctctattttcttgacggcaactccttctaagtcaaggagatttttccaaaaaaaaaaaaaaaaaa

SEQ ID NO: 164 - protein, 495 aa, Glycine max
MAVDRSLTRCCSLVLWSWMLLRMMMAQGAAARANRKEWDSVIKLPAEPVDADSDHEVGTRWAVLVAGSNGYGNYRHQADVCHAYQLLIKGGLKEENIVVFMYDDIATDELNPRPGVIINHPEGQDVYAGVPKDYTGDNVTTENLFAVILGDKSKLKGGSGKVINSKPEDRIFIYYSDHGGPGILGMPNMPYLYAMDFIDVLKKKHASGSYKEMVIYVEACESGSVFEGIMPKDLQIYVTTASNAQENSWGTYCPGMDPSPPPEYITCLGDLYSVAWMEDSETHNLKRESVKQQYKSVKQRTSNFNNYAMGSHVMQYGDTNITAEKLYLYQGFDPAAVNFPPQNGRLETKMEVVNQRDAELFFMWQMYQRSNHQPEKKTDILKQIAETVKHRKHIDGSVELIGVLLYGPGKGSSVLQSMRAPGLALVDDWTCLKSMVRVFETHCGTLTQYGMKHMRAFANICNSGVSEASMEEACLAACEGYNAGLLHPSNRGYSA

SEQ ID NO: 165 - DNA, 3065 bp, Glycine max
aaaatgcccactttttttcttccaacgctcctcctccttctcatagccttcgccacctctgtctccggccgccgtgacctcgtcggagactttctccggctgccctccgaaactgataacgacgacaacttcaagggcacccggtgggccgtcctcctcgccggttccaatggttactggaattacagacatcaggctgatgtttgtcacgcctatcaaatattgaggaaaggtggtctgaaagaagaaaatattattgtttttatgtatgatgacattgcattcaatggggaaaacccaaggcctggagtcatcattaacaaaccagatggaggtgatgtttataaaggagttccaaaggattacaccggcgaagatgttactgttgataacttttttgctgctttacttggaaataagtcagcactgactggtggcagtgggaaggttgtggacagtggtcctgatgatcatatatttgtatactatactgaccatggaggtcctggggtgctcgggatgcctgctggtccttacttatacgcggatgatctgattgaagtcttgaagaaaaagcatgcttctggaacatataaaaacctagtattttatctggaggcatgtgaatctgggagtatctttgaaggtcttcttcctgaagatatcaatatttatgcaaccactgcttccaatgcagaagaaagtagttggggaacatattgccccggggagtatcctagtcctcccccagaatatacaacctgtttgggtgacttgtacagtgttgcttggatggaagacagtgacagacacaatttgcgaacagaaactctgcaccaacaatataaattggttaaagagaggactatatctggagattcatactatggctctcacgtgatgcagtatggtgatgtacggcttagcagtgatgttctcttccattatttgggtacagatcctgctaatgataatttcacttttgtggatgaaaactccttatggtcaccttcaaaaccagtcaaccaacgtgatgctgatctcatccatttttgggataagttccgcaaagctcctgagggttctctcaggaaaaatacagctcagaaacaagttttggaagcaatgtctcacagaatgcatgtagacaacagtgtaaaactgattgggaagcttttatttggcattgaaaagggtccagaagtactcaacgctgttagaccggctggatcggcacttgttgatgactggcactgcctgaaaaccatggtgaggacttttgagacacattgtggatccttgtctcaatatggcatgaaacacatgaggtcctttgcaaacatctgcaatgtagggataaagaatgagcaaatggctgaggcctctgcacaagcttgtgtctctattccttccaatccttggagttctctgcaaaggggtttcagtgcataataattcctgtaatgtgcaccagtaaagaccaaagtatgattattgttacattatgctatatgattgtacttgtatatacatattttgtcccgcctttgtaaatacaattgggacactactaggattgggaagaagggtctttacatttttagtttggcaaatagatattgcaactacctttgtataaatctatttctgaagaagcaattacaactttcaagggatgatagcattttgtggcataaggattaaggaggcataaaggaccaattgctttggaatattcactcatgacaaggcacaaggtcatgcgtgtatgccaacacatagtaatgatgtgtgtttttattcagtaggcaactggcagatcgggttttcccttgtcacttttgtataattattttggaagaatttatgatgtcaaagttattgtttaatattaatggcgacattgtatttattatttgtaaaataagaaaaaaaggtgaaatatagagtgaagaagaagaaatagagggttttggtgtttgaatcgtgaaaatgttcagaaaccagtacgacacggacgtgacgacatggagcccggcggggaggctgttccaggtggagtacgcgatggaggcggtgaagcagggctcggcggcgatagggctccgatccaagacccacgtggtcctcgcatgcgtcaacaaggctaactccgaactctcatcgcaccagaagaagatcttcaaggtcgacaaccacatcggcgtcgccatcgccggcctcaccgccgacggccgcgtcctctcccgctacatgcgatccgagtgcatcaactataactacacctacgagtcaccgctccccgtagggagactcgtcgttcagctcgccgataaggctcaggtttgcacccagcggtcatggaaacgtccttatggagttggactcctggtagctggattagatgaatcaggagctcacctctattacaactgtcccagtggaaactattttgaatatcaggcttttgctattgggtctcgctctcaagctgcaaagacatatttggaacgcaggtttgagaattttgtgggctcttcacgagaagatctgatcaaagatgcacttattgcaactagggagtccttgcaaggtgaaaaactcaggagttctgtgtgcacaattgctgtggttggtgttggtgagccattccacattttggatcaggaaactgttcaacagttgattgatacttttgagattgtgagggaggaagaagctgctccagctgaagaagaagctcagccagcagccgaacaggatgctcccacagatccaggtgctgctgctgcagatcaaggtggtggttgctgctgctgtagaccaaggtggttctcctatggacatttgataatttaaaattaagtactagaggtgttgaataccaatatttaaagacgagtaggtttcatgtgtcatgggacaagatatttctttgatggaatttttttccccttaatcctgtttgttttttcaattcatccatgcctgatcattgtaaacgattttatagctgtttgatgaacttgaatgcatgatttacaataattaattgaaattcaggc

SEQ ID NO: 166 - protein, 482 aa, Glycine max
MPTFFLPTLLLLLIAFATSVSGRRDLVGDFLRLPSETDNDDNFKGTRWAVLLAGSNGYWNYRHQADVCHAYQILRKGGLKEENIIVFMYDDIAFNGENPRPGVIINKPDGGDVYKGVPKDYTGEDVTVDNFFAALLGNKSALTGGSGKVVDSGPDDHIFVYYTDHGGPGVLGMPAGPYLYADDLIEVLKKKHASGTYKNLVFYLEACESGSIFEGLLPEDINIYATTASNAEESSWGTYCPGEYPSPPPEYTTCLGDLYSVAWMEDSDRHNLRTETLHQQYKLVKERTISGDSYYGSHVMQYGDVRLSSDVLFHYLGTDPANDNFTFVDENSLWSPSKPVNQRDADLIHFWDKFRKAPEGSLRKNTAQKQVLEAMSHRMHVDNSVKLIGKLLFGIEKGPEVLNAVRPAGSALVDDWHCLKTMVRTFETHCGSLSQYGMKHMRSFANICNVGIKNEQMAEASAQACVSIPSNPWSSLQRGFSA

SEQ ID NO: 167 - DNA, 1756 bp, Brassica napa
tcatcaccttattgattggttgacaaaaaacaaacagataagaaaagaaaagattcattatttaatagttcccccgccgattaaaagattcgtatccacgtcaccatacgcctctccaacgatgacacctgtcgccgtcgccgttctcgtcctctccttgatcgccgtctccgccgcaagacaaaaccccgacgacgacgtcatcaaactcccctcgcaagcttccaggttcttccgccccaacaacgacgacgaatcttcatcgtccggcaccaggtgggccgttctggtcgccggatcgagcggttattggaactacagacatcaggctgatgtttgtcatgcttatcaactactgaggaaaggaggattgaaagaggagaatattgtggttttcatgtatgatgatattgctgataatgaagagaatccgaggaaagggatcattatcaatagccctcatgggagtgatgtctatgaaggagttcccaaggattacactggagatgatgttactgttgataatctgtttgctgtgatccttggagataaaactgctgttaagggagggagtgggaaggttgtggatagtggtcctaatgatcatatttttatattctatagtgaccatggtggtcctggagttcttgggatgccgacttctccttacttatatgctgatgacttgaatgatgtcttgaagaaaaaacatgcttccggaacctacaaaagcatggtgttctatcttgaagcttgtgagtctggaagtatctttgaagggcttcttgaagagggtttaaacatctacgccacaactgcatcaaacgcagtggaaagcagttggggtacctattgccctggggaggagcctagccctccaccggagtatgaaacttgcttaggtgacttatacagtgttgcatggatggaagacagcggtgtgcacaatctacaaactgagactctacgccaacaatatgagctagtgaagaggaggactgctggtggtgcgtcggcttacggttctcatgtgatgcaatatggagatgtaggacttaacaaggataagctcgacctttacatgggaacaaaccctgccaatgacaacttcacttttgtggatgctaattcactgactccaccttcaggagttactaaccagcgtgatgcagatcttgtccatttctgggataagtaccgaaaggcaccagaaggttccacaaggaaaacagaagctcagaagcaagtccttgaagccatgtctcacagacttcatgttgacaacagtgtgaaactcgtcggcaaactcttgtttggtatctcagaaggttctgaagtgctaaacaaagtaaggcctgctggacaacctctggccgatgactggacttgccttaaaaacacggtgagagcttttgagagacactgtgggtcgctgtcacagtacggtatcaagcacatgaggtcatttgcaaacatctgcaacgcagggatccaaatggagcaaatggaagaggcagcttcacaggcttgcacctcaatcccatctggtccttggagctctcttcaccgtggattcagtgcttaaaacccctaaatccctctttgcatttgtttaatactagtaccaatacccaaatattcctatttcgattcccctgtatatctcattatcatttccctcttgattatctaattacagattatacatatgctttgtacaaaatgcttgtagaaactcaagttaatgtaaacaacg

SEQ ID NO: 168 - protein, 487 aa, Brassica napa
MTPVAVAVLVLSLIAVSAARQNPDDDVIKLPSQASRFFRPNNDDESSSSGTRWAVLVAGSSGYWNYRHQADVCHAYQLLRKGGLKEENIVVFMYDDIADNEENPRKGIIINSPHGSDVYEGVPKDYTGDDVTVDNLFAVILGDKTAVKGGSGKVVDSGPNDHIFIFYSDHGGPGVLGMPTSPYLYADDLNDVLKKKHASGTYKSMVFYLEACESGSIFEGLLEEGLNIYATTASNAVESSWGTYCPGEEPSPPPEYETCLGDLYSVAWMEDSGVHNLQTETLRQQYELVKRRTAGGASAYGSHVMQYGDVGLNKDKLDLYMGTNPANDNFTFVDANSLTPPSGVTNQRDADLVHFWDKYRKAPEGSTRKTEAQKQVLEAMSHRLHVDNSVKLVGKLLFGISEGSEVLNKVRPAGQPLADDWTCLKNTVRAFERHCGSLSQYGIKHMRSFANICNAGIQMEQMEEAASQACTSIPSGPWSSLHRGFSA

SEQ ID NO: 169 - DNA, 1604 bp, Brassica napa
tttacacagagagagcaaaacaacagttctttagagtaattttctgacaatgtcttctcttggtcatttacttgttcttgtgtttctctatgttctgcttttttactcagctgattctcgcaaaccccaagtccttcatgacactggatctagcgaagatggtgcaaaaggcacaagatgggctgttctaattgctggatcaagttattattataactacaggcatcaggctgacatatgccatgcatatcaagttctgcgaaaagggggtctaaaagatgaaaacattattgtgtttatgtatgatgatatcgcgtttaaccctgagaatcccaggcctggagttatcatcaatagacctgatggtggagatgtttatgaaggcgttcctaaggactacactaaagaggctgttaatgtgaagaacttttataatgtgatacttggaaacgaaagtggcatcacaggaggaagtggcaaagttgtgaaaagtggtcctaatgatagtatattcatctactatgctgaccatggagctcctggtttactatcgatgcctgatggtgaagatatccatgcaaaagatttcattaaagtcttggagaagatgcataagcttaaaagatacaagaagatggtgatttatgttgaagcatgtgagtctggaagtatgtttgaagggattttaaagaccaatctaaacatacttgcagtaactgcttctaatgcgacagagagcagttttggaatctactgtcctggtgaatatcctcctcctcctcctgaatataatggtgtttgtctcggcgatacatttagcgtctcttggcttgaggacagtgagcttcatgacatgagtaaagagacattgaagcagcaataccaagctgtaaagagaagaacaggtcctgatgctgaaccagggacgagttctcatgtaagccgtttcggatcaaaggcgcttcttaaagactatcttgtctcttacattggaaccaatcctgataacgaaaacttcacttttgctggattcactgcttcaccaatctctacttcaagctcggtcaatactcgcgatatccctttgttatatctcaagagcaagattcaaagatctccaatggagtcacctgaaagacaagagcttcagaagaagctgtttgaagaaatgaatcataggagacaaatcgatcagaacattgtggagattcttaaactttcacttaagcaaaccaatgtcttaaatctcttaatttccacaagaacaacaggacaacctcttgtagacgactgggattgcttcaagactctggttaatagcttcaagaatcactgtggagcaacgatggattacggattgaagtatacaggagcgcttgccaatatctgcaatatgggagtggatgtgaagcaaactgtttcagctattgaacacgcttgtgcacattaaatgaaatgatgtgcataaataatgtgatcgacttaaaaaatatgaaagttattgcattaagatatatgaactgtcgagatggttgatgatgcctatttttactttaataaaaaatttagttggtaacgcgaaaaaaaaaaaaaaaaccgcccct

SEQ ID NO: 170 - protein, 466 aa, Brassica napa
MSSLGHLLVLVFLYVLLFYSADSRKPQVLHDTGSSEDGAKGTRWAVLIAGSSYYYNYRHQADICHAYQVLRKGGLKDENIIVFMYDDIAFNPENPRPGVIINRPDGGDVYEGVPKDYTKEAVNVKNFYNVILGNESGITGGSGKVVKSGPNDSIFIYYADHGAPGLLSMPDGEDIHAKDFIKVLEKMHKLKRYKKMVIYVEACESGSMFEGILKTNLNILAVTASNATESSFGIYCPGEYPPPPPEYNGVCLGDTFSVSWLEDSELHDMSKETLKQQYQAVKRRTGPDAEPGTSSHVSRFGSKALLKDYLVSYIGTNPDNENFTFAGFTASPISTSSSVNTRDIPLLYLKSKIQRSPMESPERQELQKKLFEEMNHRRQIDQNIVEILKLSLKQTNVLNLLISTRTTGQPLVDDWDCFKTLVNSFKNHCGATMDYGLKYTGALANICNMGVDVKQTVSAIEHACAH

SEQ ID NO: 171 - DNA, 1943 bp, Zea mays
tccactctcgctccctctccctcccttccctcccacgcaaatggtggccgctcgcctccgcctctcgctgctactctccgtctgcctctcctccgcgtgggcgcgcccacgcctcgagccggccatccgcctgccgtcgcagcgcgccgcggcggccgacgaaacggacgacggcgacgtcgggacccgctgggccgtgctcatcgccggctccaacggctactacaactaccgccaccaggcggacatctgccatgcataccagatcatgaagaagggcggacttaaggacgagaacatcgttgtcttcatgtacgatgacatcgcgcatagcccggaaaatccgaggcctggtgtcatcataaatcatccccagggtggcgacgtctatgctggggtgccaaaggattacactgggcgagaggtcaacgtcgacaatttcttcgctgttctgcttggcaacaaaactgctctcaggggtgggagcggcaaggttgtggacagtggccccaatgatcatatatttgttttctacagtgaccatgggggtcctggtgtccttggaatgcctacgtatccatatctctatggtgatgacctcgtagatgtcctgaagaagaagcatgctgccgggacctacaaaagcctggtcttttaccttgaagcgtgcgaatctgggagcatctttgagggcctcctgccgaatgacatcaatgtgtatgcgaccaccgcgtcaaatgcagaggagagtagctgggggacgtactgccctggcgagttcccgagccctccaccggagtatgacacttgcttgggagacctgtatagtgttgcttggatggaagacagtgatttccacaatctgcgaactgaatctctcaagcagcaatacaacttggtcaaggataggacagcggttcaggatacattcagctatggctcccatgtgatgcaatatggttcattggagttgaatgttaagcatctgttttcgtacattggcacaaaccctgctaacgatgacaacacgtttatagaagacaactcgttgccatcattctcaaaggctgttaatcagcgcgacgctgaccttgtctacttctggcagaagtaccggaaattggcagacagctcacctgagaaaaatgaagctcggagggagttgcttgaagtgatggcccacaggtctcatgttgacagcagtgttgagctcattggaagccttctctttggctctgaggacggtccaagggttctgaaagccgtccgtgcagctggtgagcctctggtcgatgattggagctgtctcaagtccacggttcgtacttttgaggcgcaatgtgggtcgttggcgcagtatgggatgaagcacatgcggtccttcgcaaacatctgcaacgctggcatccttcctgaggcagtgtcgaaggtcgctgctcaggcttgcaccagcattccttccaacccctggagttctatccacaagggttttagcgcctaagaatcataaggtgaggcgaaatatttcagccgctccaccgcaacgaactggtttacattaccagtcctcaggggggtcctagttcttgaaccataggtgaagcagacttataccactattatagctgttccaccgtcgttccagattacatagctatgcccaatttccggtgtacatatatagtcggaaagttatttggcaattgtattggtcgttgctgtatatattccctatagtttgttagcagatgtgtagtttgtaattccataaaaatgaaggacgcgttactgctatttctatgtagccgactggtgctcatgtgaaactttaccccattcttgttgggaaatgtactatccgtggtggaattcttgcatcgaaaacaattcccgggtggtcctttattcaaaaaaaaaaaaaaaaaagcggccggtgctagagg

SEQ ID NO: 172 - protein, 486 aa, Zea mays
MVAARLRLSLLLSVCLSSAWARPRLEPAIRLPSQRAAAADETDDGDVGTRWAVLIAGSNGYYNYRHQADICHAYQIMKKGGLKDENIVVFMYDDIAHSPENPRPGVIINHPQGGDVYAGVPKDYTGREVNVDNFFAVLLGNKTALRGGSGKVVDSGPNDHIFVFYSDHGGPGVLGMPTYPYLYGDDLVDVLKKKHAAGTYKSLVFYLEACESGSIFEGLLPNDINVYATTASNAEESSWGTYCPGEFPSPPPEYDTCLGDLYSVAWMEDSDFHNLRTESLKQQYNLVKDRTAVQDTFSYGSHVMQYGSLELNVKHLFSYIGTNPANDDNTFIEDNSLPSFSKAVNQRDADLVYFWQKYRKLADSSPEKNEARRELLEVMAHRSHVDSSVELIGSLLFGSEDGPRVLKAVRAAGEPLVDDWSCLKSTVRTFEAQCGSLAQYGMKHMRSFANICNAGILPEAVSKVAAQACTSIPSNPWSSIHKGFSA

SEQ ID NO: 173 - DNA, 1437 bp, Arabidopsis thaliana
atgaccaccgtcgtttcctttctcgccctcttcctctttctagtcgccgccgtttctggtgacgtcatcaaacttccttctctagcttctaagttcttccgcccaactgaaaacgacgatgattctactaagtgggctgttctcgtcgccggatccagcggatactggaattatcgtcatcaggcggatgtttgtcatgcttatcagcttttgaagaaaggtggagtgaaagaggagaatattgtggtgtttatgtatgatgacattgcgaagaacgaggagaatccaagacctggagttattatcaatagtcctaatggagaggatgtctataatggagttcccaaggattacactggagatgaagttaatgttgataacttattagctgtgattcttggaaacaaaacggctcttaaaggaggaagtgggaaagttgtagatagcggtccaaacgatcatatctttatatactatagtgatcacggtggtccgggagtgctcgggatgccaacttctccaaacctatatgcaaatgatctcaatgatgtcttgaagaaaaaatatgcttcaggaacatataagagcttggtgttttatttggaggcttgtgaatctggaagtatttttgaaggtcttttaccagagggtttaaatatttacgcgacaactgcatcgaatgcagaagaaagtagctggggtacttactgtcctggagaggatcctagtcctccttctgagtatgagacctgtttgggtgacttatacagtgttgcttggatagaagatagtgaaaaacacaatttacaaacagagactttgcacgagcaatatgaattggtgaaaaagagaactgcaggttctggtaagtcttatggttctcatgttatggaatttggagatataggactcagcaaggagaagcttgtcctttttatgggtacaaatccagcagatgaaaacttcacctttgtgaatgagaattcaataaggccgccttcaagagttacaaaccagcgtgatgcggatcttgtccatttctggcataagtatcaaaaggcaccggaagggtcagcaagaaaagttgaagctcagaagcaagtccttgaagcaatgtctcacagacttcatgttgataatagcattctgttgattgggattcttttgtttggtttggaaggtcatgcggtgttaaataaagtccggccttctggagaaccgcttgttgacgattgggactgccttaaatctctggtgagagctttcgagaggcactgtggatcgttgtctcagtacggaataaagcacatgaggtcgattgcaaacatgtgcaacgcagggattcagatgaggcaaatggaggaggcagcaatgcaggcttgtcccaccatccctaccagtccttggagctctcttgaccgtggattcagtgcttga

SEQ ID NO: 174 - protein, 478 aa, Arabidopsis thaliana
MTTVVSFLALFLFLVAAVSGDVIKLPSLASKFFRPTENDDDSTKWAVLVAGSSGYWNYRHQADVCHAYQLLKKGGVKEENIVVFMYDDIAKNEENPRPGVIINSPNGEDVYNGVPKDYTGDEVNVDNLLAVILGNKTALKGGSGKVVDSGPNDHIFIYYSDHGGPGVLGMPTSPNLYANDLNDVLKKKYASGTYKSLVFYLEACESGSIFEGLLPEGLNIYATTASNAEESSWGTYCPGEDPSPPSEYETCLGDLYSVAWIEDSEKHNLQTETLHEQYELVKKRTAGSGKSYGSHVMEFGDIGLSKEKLVLFMGTNPADENFTFVNENSIRPPSRVTNQRDADLVHFWHKYQKAPEGSARKVEAQKQVLEAMSHRLHVDNSILLIGILLFGLEGHAVLNKVRPSGEPLVDDWDCLKSLVRAFERHCGSLSQYGIKHMRSIANMCNAGIQMRQMEEAAMQACPTIPTSPWSSLDRGFSA

SEQ ID NO: 175 - DNA, 1461 bp, Arabidopsis thaliana
atggctaagtcttgctatttcagaccagctcttcttcttctgttagttcttttggttcatgccgagtcacgcggtcggttcgagccaaagattcttatgccgacagaggaagctaacccggctgaccaagacgaagatggtgtcggtacaagatgggcggttctcgtcgctggttcttctggatatggaaactacagacaccaggctgacgtgtgtcacgcatatcaaatactaagaaaaggaggtttaaaggaagaaaacatagtcgttttgatgtatgatgatatcgcaaaccacccacttaatcctcgtccgggtactctcatcaaccatcctgacggtgacgatgtttacgccggagtccctaaggactatactggtagtagcgttacggctgcaaacttctacgctgtactcctaggcgaccagaaggctgttaaaggtggaagcggtaaggtcatcgctagcaagcccaacgatcacattttcgtatattatgcggatcatggtggtcccggagttcttgggatgccaaatacgcctcacatatatgcagctgattttattgaaacgcttaagaagaagcatgcttccggaacatacaaagagatggttatatacgtagaagcgtgtgaaagtgggagtattttcgaagggataatgccaaaggacttgaacatttacgtaacaacggcttcaaatgcacaagagagtagttatggaacatattgtcctggcatgaatccgtcacccccatctgaatatatcacttgcttaggggatttatatagtgttgcttggatggaagatagtgagactcacaatttaaagaaagagaccataaagcaacaataccacacggtgaagatgaggacatcaaactacaatacctactcaggtggctctcatgtgatggaatacggtaacaatagtattaagtcggagaagctttatctttaccaagggtttgatccagccaccgttaatctcccactaaacgaattaccggtcaagtcaaaaataggagtcgttaaccaacgcgacgcggaccttctcttcctttggcatatgtatcggacatcggaagatgggtcaaggaagaaggatgacacattgaaggaattaactgagacaacaaggcataggaaacatttagatgcaagcgtcgaattgatagccacaattttgtttggtccgacgatgaatgttcttaacttggttagagaacccggtttgcctttggttgacgattgggaatgtcttaaatcgatggtacgtgtatttgaagagcattgtggatcactaacgcaatatgggatgaaacatatgcgagcgtttgcaaacgtttgtaacaacggtgtgtccaaagagctgatggaggaagcttctactgcggcatgcggtggttatagtgaggctcgctacacggtgcatccatcaatcttaggctatagcgcctga

SEQ ID NO: 176 - protein, 486 aa, Arabidopsis thaliana
MAKSCYFRPALLLLLVLLVHAESRGRFEPKILMPTEEANPADQDEDGVGTRWAVLVAGSSGYGNYRHQADVCHAYQILRKGGLKEENIVVLMYDDIANHPLNPRPGTLINHPDGDDVYAGVPKDYTGSSVTAANFYAVLLGDQKAVKGGSGKVIASKPNDHIFVYYADHGGPGVLGMPNTPHIYAADFIETLKKKHASGTYKEMVIYVEACESGSIFEGIMPKDLNIYVTTASNAQESSYGTYCPGMNPSPPSEYITCLGDLYSVAWMEDSETHNLKKETIKQQYHTVKMRTSNYNTYSGGSHVMEYGNNSIKSEKLYLYQGFDPATVNLPLNELPVKSKIGVVNQRDADLLFLWHMYRTSEDGSRKKDDTLKELTETTRHRKHLDASVELIATILFGPTMNVLNLVREPGLPLVDDWECLKSMVRVFEEHCGSLTQYGMKHMRAFANVCNNGVSKELMEEASTAACGGYSEARYTVHPSILGYSA

SEQ ID NO: 177 - DNA, 1401 bp, Arabidopsis thaliana
atgtctagtcctcttggtcactttcagattcttgtttttcttcatgctttgcttatcttctcagctgagtcccgcaaaacccaattgctgaacgataatgatgttgaatctagcgacaagagtgcaaaaggcacacgatgggctgttttagttgctggatcaaatgaatattataactacaggcatcaggctgacatatgccacgcgtatcagatactccgaaaaggcggtttaaaagatgaaaacatcattgtgtttatgtatgatgatatcgcgttttcctcggagaatcctaggcctggagttatcattaataaaccagatggagaagatgtttataaaggagttcctaaggactacactaaagaagctgttaatgttcaaaacttctacaatgtgttacttggaaatgaaagtggcgtcacaggaggaaatggcaaagttgtgaaaagtggtcctaatgataatatcttcatctattatgctgaccatggagctcctggcttaatagcgatgcccactggtgatgaagttatggcaaaagatttcaatgaagtcttggagaagatgcataagagaaaaaaatacaacaagatggtgatctatgttgaagcatgtgaatcaggaagtatgtttgaagggattttaaagaaaaatctcaacatatacgcagtgactgctgctaattctaaagagagcagctggggagtttactgtcctgagtcatatcctcctcctccttctgagattggaacttgtctcggcgatacatttagcatctcttggcttgaggacagtgaccttcatgacatgagcaaagagactttggagcaacaataccacgttgtaaagagaagagtaggatctgatgtaccagagacttctcatgtatgccgtttcggaacagagaagatgcttaaagattatctttcctcttacattggaagaaatcctgaaaacgataacttcactttcacggaatccttttcctcaccaatctctaattctggcttggtcaatccgcgcgatattcctctgctatacctccagagaaagattcaaaaagctccaatgggatcacttgaaagcaaagaagctcagaagaaattgcttgacgaaaagaatcataggaaacaaatcgatcagagcattacagacattctgcggctttcagttaaacaaaccaatgtcttaaatctcttaacttccacaagaacaacaggacagcctcttgtagacgattgggattgcttcaagactctagttaatagcttcaagaatcactgcggtgcaacggtgcattacggattgaagtatacaggagcgcttgccaatatctgcaatatgggagtggatgtgaagcaaactgtttcagccattgaacaagcttgttcgatgtaa

SEQ ID NO: 178 - protein, 466 aa, Arabidopsis thaliana
MSSPLGHFQILVFLHALLIFSAESRKTQLLNDNDVESSDKSAKGTRWAVLVAGSNEYYNYRHQADICHAYQILRKGGLKDENIIVFMYDDIAFSSENPRPGVIINKPDGEDVYKGVPKDYTKEAVNVQNFYNVLLGNESGVTGGNGKVVKSGPNDNIFIYYADHGAPGLIAMPTGDEVMAKDFNEVLEKMHKRKKYNKMVIYVEACESGSMFEGILKKNLNIYAVTAANSKESSWGVYCPESYPPPPSEIGTCLGDTFSISWLEDSDLHDMSKETLEQQYHVVKRRVGSDVPETSHVCRFGTEKMLKDYLSSYIGRNPENDNFTFTESFSSPISNSGLVNPRDIPLLYLQRKIQKAPMGSLESKEAQKKLLDEKNHRKQIDQSITDILRLSVKQTNVLNLLTSTRTTGQPLVDDWDCFKTLVNSFKNHCGATVHYGLKYTGALANICNMGVDVKQTVSAIEQACSM

SEQ ID NO: 179 - DNA, 1506 bp, Oryza sativa
atggcggcgcgcgctcgcctccgcctcgtcctgcccccgctcgcggcgctgctcctcttcgcgcacctcgccgccgtcgcggtggcgcggccgcggtgggaggaggagggcagcaacctccgcctgccgtcggagcgcgccgtggcggctggcgcggcggcggacgacgctgccgaggccgccgagggcaccaggtgggccgtcctcatcgccggctccaacggctactacaactaccgccaccaggcggatgtctgccatgcctaccagatcatgaagaggggcgggctcaaggacgagaacatcatcgtcttcatgtacgatgacatcgcgcacaacccggagaatccgaggcctggtgtcatcatcaaccatccccagggtggcgatgtctatgctggggtcccgaaggattacactgggaaggaggttaatgtcaaaaacttgtttgctgttctgctcggtaacaaaactgctgtcaaaggtgggagtggcaaagtcctggacagtggccccaacgatcatattttcattttttacagtgaccatgggggtcctggtgtccttgggatgccaacctatccatacctctacggtgatgatcttgtagatgttctgaagaagaagcatgctgctgggacgtacaaaagcctggtcttttaccttgaagcctgtgaatctggaagcatctttgagggtctattgccaaatggcatcaatgtttatgccaccactgcatcaaacgctgatgagagcagctggggaacatactgccctggggagtacccgagcccacctccggagtacgacacatgcctaggggacttgtacagcgttgcttggatggaagacagcgatgtccacaacctgagaactgaatcactcaagcagcagtacaatctcgtcaaggaaaggacatctgtgcagcacacatattactctgggtcacatgtgatggaatacggttctttagagctgaatgcccatcatgtgttcatgtacatgggttccaatccggctaacgacaatgctacatttgtggaagataactcgttgccatcgttctcaagggctgttaatcagcgggatgctgacctggtttacttctggcagaagtaccgcaaattgcctgagagttctcctgagaaaaacgaagctcggaagcaattgcttgaaatgatggcacacagatctcatgttgacaacagtgttgagctgatcggaaaccttctctttggctctgaggaaggcccaagggttctaaaggctgttcgtgcaactggcgaacctcttgttgatgactggagttgtctcaagtctatggtacgcactttcgaagcacaatgcggctcgctagcgcagtatggaatgaagcatatgcgttcctttgcaaacatctgcaatgctggcatctctgctgaagcgatggcaaaggttgctgcgcaggcttgcaccagcattccctccaacccctggagttccacccataggggttttagtgcttaa

SEQ ID NO: 180 - protein, 510 aa, Oryza sativa
MAARARLRLVLPPLAALLLFAHLAAVAVARPRWEEEGSNLRLPSERAVAAGAAADDAAEAAEGTRWAVLIAGSNGYYNYRHQADVCHAYQIMKRGGLKDENIIVFMYDDIAHNPENPRPGVIINHPQGGDVYAGVPKDYTGKEVNVKNLFAVLLGNKTAVKGGSGKVLDSGPNDHIFIFYSDHGGPGVLGMPTYPYLYGDDLVDVLKKKHAAGTYKSLVFYLEACESGSIFEGLLPNGINVYATTASNADESSWGTYCPGEYPSPPPEYDTCLGDLYSVAWMEDSDVHNLRTESLKQQYNLVKERTSVQHTYYSGSHVMEYGSLELNAHHVFMYMGSNPANDNATFVEDNSLPSFSRAVNQRDADLVYFWQKYRKLPESSPEKNEARKQLLEMMAHRSHVDNSVELIGNLLFGSEEGPRVLKAVRATGEPLVDDWSCLKSMVRTFEAQCGSLAQYGMKHMRSFANICNAGISAEAMAKVAAQACTSIPSNPWSSTHRGFSASPLAQGYSA

SEQ ID NO: 181 - DNA, 1506 bp, Oryza sativa; identical to SEQ ID NO: 179

SEQ ID NO: 182 - protein, 394 aa, Oryza sativa
MYDDIANNILNPRPGVIVNHPQGEDVYAGVPKDYTGDEVTAKNFYAVLLGNKTAVTGGSRKVIDSKPNDHIFIFYSDHGGPGVLGMPNLPYLYAADFMKVLQEKHASNTYAKMVIYVEACESGSIFEGLMPEDLNIYVTTASNAEESSWGTYCPGMEPSPPSEYITCLGDLYSVSWMEDSETHNLKEESIKKQYEVVKKRTSDMNSYGAGSHVMEYGDRTFKDDKLYLYQGFDPANAEVKNKLSWEGPKAAVNQRDADLLFLWRRYELLHDKSEEKLKALREISDTVMHRKLLDSSVDLVGKLLFGFGNGPSVLQAVRPSGQPLVDDWDCLKRMVRIFESHCGPLTQYGMKHMRAFANICNNGISGASMKEASIATCSSHNSGRWSSLVQGYSA

SEQ ID NO: 183 - DNA, 1494 bp, Oryza sativa
atggctgcgcggtgctgggtatggggcttcgtcgtcgcgctcctggctgtggcggcggcggcggatggggaggaggaggaggggaagtgggagccgctgattcggatgccgacggaggaaggggacgacgctgaggctgctgctcccgctcctgctcctgcggcggcggattacggggggacgaggtgggcggtgctcgtcgccggctcctccggctacgggaactaccggcaccaggccgatgtgtgccatgcgtaccagattctgcagaagggaggagtgaaggaggagaacattgtggtgtttatgtatgatgacattgcccataacattctcaatccaaggcctgggaccatcatcaaccatcctaaaggtggagatgtttatgctggtgttccaaaggactacactggtcaccaggtcaccactgagaacttctttgctgttctcttgggcaataaaaccgcagttactggagggagtgggaaggttatagacagcaaaccagaggatcacatcttcatctattactcagatcatgggggtcctggagttcttggtatgcctaacctgccgtatctttatgctggtgattttattaaagtgttacaaaagaaacatgcttccaacagctactcgaaaatggttatatatgtcgaagcatgtgaaagtggcagtatcttcgagggcttaatgccagaaaatcttaatatttatgtcacaacagcatccaatgcagttgagaatagttggggaacatactgccctggggaggaaccatcacctcctcctgaatatattacatgtctaggtgacatgtacagtgttgcttggatggaggacagtgagactcataatctaaagaaggaaactatcgaggatcagtatgagctggttaaaaaaagaacatcaaatgcaaataagttaaatgagggctctcatgtcatggaatatggtgacaagacattcaaggatgagaagctcttcctctatcaaggttttaatcctgcaaatggcaacatcacaaatgaattgatttggccagtaccaaaggctacagtcaatcaaagagatgccgatcttcttttcatgtggaagaggtatgagcagttgaatggggtgtctgaagacaagctgagggctcttagggagatagaagacaccatagcacacaggaagcatcttgacagcagtatcgatttcatcgggaagcttgtgtttggttttgaaaatgggcctttagcccttgaggctgcaagaagctctggtcaaccattagtcgacaactgggattgtttgaagaagatggtgcgaatttttgaatctcaatgtggatcactcactcagtatggcatgaaatacatgagagcatttgcaaacatatgcaacaacggtgtctctgaggccaaaatgatggaagcaagtatcaacgcttgcggccgttacaactcggcgagatggagcccaatgactgaaggaggacacagtgcttga

SEQ ID NO: 184 - protein, 497 aa, Oryza sativa
MAARCWVWGFVVALLAVAAAADGEEEEGKWEPLIRMPTEEGDDAEAAAPAPAPAAADYGGTRWAVLVAGSSGYGNYRHQADVCHAYQILQKGGVKEENIVVFMYDDIAHNILNPRPGTIINHPKGGDVYAGVPKDYTGHQVTTENFFAVLLGNKTAVTGGSGKVIDSKPEDHIFIYYSDHGGPGVLGMPNLPYLYAGDFIKVLQKKHASNSYSKMVIYVEACESGSIFEGLMPENLNIYVTTASNAVENSWGTYCPGEEPSPPPEYITCLGDMYSVAWMEDSETHNLKKETIEDQYELVKKRTSNANKLNEGSHVMEYGDKTFKDEKLFLYQGFNPANGNITNELIWPVPKATVNQRDADLLFMWKRYEQLNGVSEDKLRALREIEDTIAHRKHLDSSIDFIGKLVFGFENGPLALEAARSSGQPLVDNWDCLKKMVRIFESQCGSLTQYGMKYMRAFANICNNGVSEAKMMEASINACGRYNSARWSPMTEGGHSA

SEQ ID NO: 185 - DNA, 1425 bp, Oryza sativa
atggggcgcggtctcctctgcctgctgctgctgcagctcgtcggcctcgtcgtcgccggcggtgggcggtggcggtggcaggaggagttcctccggctgccgtcgtcggatgagacgacgaggtgggcggtgctgatcgcggggtcgaatgggttctataactaccggcaccaggcggacgtgtgccacgcgtaccagatcatgaggaagggaggcgtggaggagcaaaacatcgtggtgatgatgtacgacgacatcgcccacaaccccgacaaccccaggcctgggctcatcttcaaccacccttccggccccgacgtctacgccggcgtccccaaggattacaccggcgacgacgtcaacgtcaacaacttcctcgccgtcctcctcggcaaccgctccgccctcaccggctccggcagcggcaaggtcgtcgccagcggccccaacgaccacgtcttcgtctactacgccgaccacggcggccccggcgtcctgagcatgccagccgacggcgagtacctgtacgccgacgacctggtcaaggcgctcaagaagaagcacgccggcggcgggtacaagagcctggtcgtgtacgtggaggcgtgcgagtccggcagcatcttcgagggcctcctgccttccgacatctccgtgtacgccaccacggcctccaacgcggaggagagcagctggggcacctactgccccggcgacgaccacgacgccccggcggcggagttcgacacctgcctcggggacctctacagcgtggcgtggatggaggacgcggaggcgcaccaggaggggcgcctcgccgagacgctgcggcagcagtacaggacggtgaagaaccggacgtccgacgagggcacctacacgctcggctcccacgtcatgcagtacggcgacatggcgctcgcaccgcagagcctggacctctactacatggatacatcacctgcgacggcgaacgaccacaaattagctgctgctggcgccaaaggcagccactcctacactgtgtctgtgaatcagcgcgacgccgatctgctctacttgtggcgcaagtaccggagagccggcgaggggacggcagagaaggtggaggctcgggagcggcttgtgcaggagatgggacggcgatcgcgcgtggacagaagcgtggagatgatcgggggcctcctcttgggcggcgccaagcacaagcagcaggttgtgcgggagcgggctgcgctggttgaggactgggagtgcctcaggtcgatggtgcggacgttcgaggatcagtgtgggtcgctgggacagtacgggataaagcacatgcgctccttcgccaacatctgcaacgccggcgtcccccaccacgccatggccaaggccgcctccctggcctgtccatcccctcctccgttacacttatga

SEQ ID NO: 186 - protein, 474 aa, Oryza sativa
MGRGLLCLLLLQLVGLVVAGGGRWRWQEEFLRLPSSDETTRWAVLIAGSNGFYNYRHQADVCHAYQIMRKGGVEEQNIVVMMYDDIAHNPDNPRPGLIFNHPSGPDVYAGVPKDYTGDDVNVNNFLAVLLGNRSALTGSGSGKVVASGPNDHVFVYYADHGGPGVLSMPADGEYLYADDLVKALKKKHAGGGYKSLVVYVEACESGSIFEGLLPSDISVYATTASNAEESSWGTYCPGDDHDAPAAEFDTCLGDLYSVAWMEDAEAHQEGRLAETLRQQYRTVKNRTSDEGTYTLGSHVMQYGDMALAPQSLDLYYMDTSPATANDHKLAAAGAKGSHSYTVSVNQRDADLLYLWRKYRRAGEGTAEKVEARERLVQEMGRRSRVDRSVEMIGGLLLGGAKHKQQVVRERAALVEDWECLRSMVRTFEDQCGSLGQYGIKHMRSFANICNAGVPHHAMAKAASLACPSPPPLHL

SEQ ID NO: 187 - DNA, 1419 bp, Populus trichocarpa
atggagacccacaaggcctattttttgtctgctattttagtgcttgcgatgctgtcttttctacatgtacagagtgttcaagccgcccggttgagcccggttgaaccaaggattcttatgccaacagggaaagatgagccagaagtcgatgatgatggtgaagaaattggctcgagatgggcggttcttgtggccggttcaagtggttatggaaattacaggcatcaggcggatgtctgccatgcatatcaactattaagaaaaggcgggataaaagaagagaacatggtggtgtttatgtatgatgatatagccatgcatcatttgaacccaaggcctggagttatcatcaaccatccacaaggagatgatgtttatgctggtgtgcctaaggattacactggtgaacaggttaatacagagaatctgtatgcagtacttcttggtaacaagagtgctgtcaagggtggaagtggcaaggttgtggatagcaagcccaatgacaggatcttcttgtactattctgatcatggaggtcctggagttcttggaatgccaaatatgccttttctatatgcaatggatttcatcgaggttctgaagaagaaacatgcatctgggagctacaaagaaatggtaatgtatatagaagcttgcgagagtgggagcatcttcgaagggatcatgcctaaggacctaaacatttacgtgacgacagcatcaaatgcggaagagagggatctgtacagtgttgcttggatggaagatagtgaaacacacaatctgaagaaagaaacaattaagcagcaatatcattcggtgaaagagaggacttccaattacaatgcattcacttctggatcccatgtgatgcaatatgggaacgaaagcctcaaaggagagaagctttttttgtatcaaggtttcgatccagctagtgtaaacttccctccaaacaatggccacattggtgcgcgtatggatgttgttaaccagagagatgcagagcttgttttcctctggcaaatgtacaaaagagctgaaggtgggtcagaaaagaagacccaaatcctcaatcagattaaagagacaatgaggcatagaactcacttggacagcagcatggaattgatcggaacactattattaggacctaaaaaaggttccaccatccttaaatctgttagggaacccgattcgcccctagtagatgactggagatgcttaaaatcaatggttcgattgtttgaaacacattgtggatcactgactcagtatggaatgaaacacatgcgagcatttgccaacatttgcaatggtggcgtctctctagcctccatggaggaagcttgtgtggccgcttgtagtggccatgatgctggggaactgcatccttcaaaccaaggttacagtgcttaa

SEQ ID NO: 188 - protein, 472 aa, Populus trichocarpa
METHKAYFLSAILVLAMLSFLHVQSVQAARLSPVEPRILMPTGKDEPEVDDDGEEIGSRWAVLVAGSSGYGNYRHQADVCHAYQLLRKGGIKEENMVVFMYDDIAMHHLNPRPGVIINHPQGDDVYAGVPKDYTGEQVNTENLYAVLLGNKSAVKGGSGKVVDSKPNDRIFLYYSDHGGPGVLGMPNMPFLYAMDFIEVLKKKHASGSYKEMVMYIEACESGSIFEGIMPKDLNIYVTTASNAEERDLYSVAWMEDSETHNLKKETIKQQYHSVKERTSNYNAFTSGSHVMQYGNESLKGEKLFLYQGFDPASVNFPPNNGHIGARMDVVNQRDAELVFLWQMYKRAEGGSEKKTQILNQIKETMRHRTHLDSSMELIGTLLLGPKKGSTILKSVREPDSPLVDDWRCLKSMVRLFETHCGSLTQYGMKHMRAFANICNGGVSLASMEEACVAACSGHDAGELHPSNQGYSA

SEQ ID NO: 189 - DNA, 1512 bp, Populus trichocarpa
atgacgcgactcattgccggcgtaatttttcttcttatttctttctgtggtatcgccgtcggtgtccgagacatcgttggtgacgttctccggttgccatcggaggcttctaggtttttccgtcccggtaaatttaatgatgataatagtgatgatgattcttccggaactagatgggccatcttgcttgccggatctaacggttactggaattaccggcaccaggcagatgtttgtcatgcatatcaactgctgagacaaggtggattgaaggaagaaaatataatagttttcatgtacgatgacattgctgataacccagagaacccaaggcctggagtcatcatcaacaatccccaaggagaagatgtttataaaggagttccaaaggattatactggtccagatgtcaccgttggaaacttttttgcggctatccttggaaacaagacagctcttaccgggggcagtggaaaagttattgatagtgggcccaatgaccatattttcatttattatactgatcatggaggtcctggggtgctagggatgcctaccaatccttacctttatgcggatgatttgattgatgtcttaaaaaagaagcatgcatccggaacctataaaagcttggtgttttatcttgaagcctgtgaatccggaagcatctttgagggtcttcttcctcaaggtctaaatatctatgcaaccacagcatcaaatgcagaagagagcagttggggaacctattgtcctggagagtatcctagccctcccccagaatacgaaacttgtttgggtgacttgtacagtgttgcttggatggaggatagtgacatacacaatttacggacagaaactctgcaccagcaatatgaactggtaaaaaggaggacttcctatgacaattctccctacggttcccatgtcatgcaatatggtgatgttggacttagcaaggacgacctcttccagtatatgggtacaaaccctgcaaatgataactacactttcgtggaggagaactccttgaggccacattctaaagttgttaatcagcgtgatgctgatctcgtccacttctggactaagtaccgcaaggccccagaaggctcttctaggaaggttgaagctcagaagcagtttgttgaagcaatgtcacatagaatgcatattgaccacagcataaaacttattgggaagctcctctttggaattgaaaaggcctcagaggcattgaacaccgtacgtcctgctgggcaacctcttgttgatgactgggtctgccttaagacactggtaaaattttacagttctcagcctctgctttatcacctcctaaccttatgggatgaaacacatgcgatctcttgcaaacctttgcaatgccggaattgtaaaggaacagatggccgaggcatcagcacaagcttgtgtaagctttccttctggttcatggagctctcttcacaaagggttcagcgcctaattgaagcagaatgtcctatttaa

SEQ ID NO: 190 - protein, 503 aa, Populus trichocarpa
MTRLIAGVIFLLISFCGIAVGVRDIVGDVLRLPSEASRFFRPGKFNDDNSDDDSSGTRWAILLAGSNGYWNYRHQADVCHAYQLLRQGGLKEENIIVFMYDDIADNPENPRPGVIINNPQGEDVYKGVPKDYTGPDVTVGNFFAAILGNKTALTGGSGKVIDSGPNDHIFIYYTDHGGPGVLGMPTNPYLYADDLIDVLKKKHASGTYKSLVFYLEACESGSIFEGLLPQGLNIYATTASNAEESSWGTYCPGEYPSPPPEYETCLGDLYSVAWMEDSDIHNLRTETLHQQYELVKRRTSYDNSPYGSHVMQYGDVGLSKDDLFQYMGTNPANDNYTFVEENSLRPHSKVVNQRDADLVHFWTKYRKAPEGSSRKVEAQKQFVEAMSHRMHIDHSIKLIGKLLFGIEKASEALNTVRPAGQPLVDDWVCLKTLVKFYSSQPLLYHLLTLWDETHAISCKPLQCRNCKGTDGRGISTSLCKLSFWFMELSSQRVQRLIEAECPI

SEQ ID NO: 191 - DNA, 1590 bp, Populus trichocarpa
atgttgagtcctggaagttggaacctctctgtatattgcatgcccctatattctaatttctttctagtcgtcagaaagctggttgattacttgaattgcagtatgagcagcagctcctatctgtgtggctatggctatggcacatttcttttcctaatcgcattgttaagttccatagctcaaagtcagggagtgatcatcaacagtactagtgcgtcaagcttgccatcgagtgttagaagagactccactaccgctgaaggaaaacaatgggccgttttggttgccggatcggctggttatgaaaattacaggcatcaggctgatgtatgccatgcataccaaatactgaagaaaggtgggttgaaagatgaaaacatcattgttttcatgtatgatgacattgcgttccatgttgataatcccaggcccggcatcatcatcaacaaaccttttggtcatgatgtttatgcaggagtccccaaggattatactggagataactgtacagtggacaacttatttgctgtacttctgggaaacaaatctgctcttactggagggagtggcaaggttgtggatagtggtccaaatgacaacattttcatatactatgctgatcatggtgctccaggtttagtcggtatgcctattgggaaagacctgtatgccaaagacctcatacaagtgttgaagaagcagcaggaagctaattcgtataaaagcatggtattctaccttgaagcttgtgagtctgggagtatgttcgaaggtcttcttccaagtaactggagcatatatgcaattactgctgcaaatggagaggagagtagctatggaatatattgcccaggatactaccctgctcctcccccagaatttcttacttgcttgggagatgtatttagcatttcttggatggaggatagtgatttgcacgacatgagccaggaaactctgcagcagcaatatgaagtggttcggagaaggacaggatttgattatgaagataggtctcatgtcatgcaatatggaaacatggagcttagtaaggagctgctctcttcttacttgggcacaaacgctgcaaacgataactacgctaccaacattaatatcgaagaatacccttctatgatcccaagagcttttgaccaacgcgaagcaactcttcttcatttctggcacaagtatcaagaagcccccgatggatctgataagaaggccgaggctcacaaggacctacttcgcatacattctcatataaggcatgtggatcgtagcctaagccatattgcttcaactctgtttggggatgaaaacgcagcaaatgcaatgaagcatgttagaccttctgggcaacctcttgttgatgactgggattgcttgaagggccttgtggaagcttatgagaaacagtgtggaggtctgtcatggtatggaaagaagtacacgagagtgatagcaaacatgtgcaatgctgggataaatgtggagcaaatgatcggtgcatccaccagagcatgctcatcaaggaccaccaccaccactcctactagaggctcccttcaaaacgaatttgacaaatag

SEQ ID NO: 192 - protein, 529 aa, Populus trichocarpa
MLSPGSWNLSVYCMPLYSNFFLVVRKLVDYLNCSMSSSSYLCGYGYGTFLFLIALLSSIAQSQGVIINSTSASSLPSSVRRDSTTAEGKQWAVLVAGSAGYENYRHQADVCHAYQILKKGGLKDENIIVFMYDDIAFHVDNPRPGIIINKPFGHDVYAGVPKDYTGDNCTVDNLFAVLLGNKSALTGGSGKVVDSGPNDNIFIYYADHGAPGLVGMPIGKDLYAKDLIQVLKKQQEANSYKSMVFYLEACESGSMFEGLLPSNWSIYAITAANGEESSYGIYCPGYYPAPPPEFLTCLGDVFSISWMEDSDLHDMSQETLQQQYEVVRRRTGFDYEDRSHVMQYGNMELSKELLSSYLGTNAANDNYATNINIEEYPSMIPRAFDQREATLLHFWHKYQEAPDGSDKKAEAHKDLLRIHSHIRHVDRSLSHIASTLFGDENAANAMKHVRPSGQPLVDDWDCLKGLVEAYEKQCGGLSWYGKKYTRVIANMCNAGINVEQMIGASTRACSSRTTTTTPTRGSLQNEFDK

SEQ ID NO: 193 - DNA, 1443 bp, Solanum lycopersicum
atggttcacgtcgccggagttttcatcctcgtcggaatcgccgtgcttgccgccgtcgaaggacgtaatgttttgaaacttccgtcggaagcttccagattcttcgatgacgcagatgactctgttggaaccagatgggccgtccttctcgccggatcaaatggttattggaattatagacatcaggctgatgtatgccatgcgtatcagctattgagaaaaggtggtctcaaagatgaaaatattattgtcttcatgtatgatgacattgctcaccatgaagagaacccaagaccaggagttattattaatagtcctgccggtgaggatgtttacgaaggagttcctaaggattacacgggagatgatgttaatgtgcacaactttttagctgttctccttggtaacaaaactgctcttactggaggtagcggaaaggtggtgaatagtggtccaaatgatcatattttcatattctatagtgatcatggtggccctggcgtgcttgggatgcctaccaatccttatctatatgccgatgatctaattgctgtgttgaaaaagaagcatgcccctgggacatataaaagcttggtattgtacattgaagcttgcgagtctggaagtatatttgagggacttcttcctaatggtctaaatatttatgccacaacagcttcaaatgctgaagaaagcagctggggaacctattgtcctggagaatatcctagtcctcctcctgaatatgagacttgcttgggtgatttgtatgctgtttcctggatggaggacagtgaaatgcacaacttgcggactgaaaatttgaggcagcagtatcacttggtcaaaaagagaactgcaaatggaaatactgcctatggttcccatgtcatgcaatttggtgatctacaactgagtatggagtctctattcaggtttatgggtacaaatcctgcaaatgataactacacttatgtagatgacaattccttgttggcatcatcaaaggctgtcaaccagcgtgatgcagatcttttacatttctgggacaagttccgcaaggctcctgaaggctctgctcggaaagttgaagctcagaaacaattcactgaagctatgtcacacagaatgcacctagatgaacgcattgcccttgttggtaagcttctgtttggaattcaaaaaggtcctgaggtgctgaagcatgttcgatctgcgggtcagcctcttgttgatgattgggcctgccttaaatcttttgtaagaacatttgagtcgcactgcggatcgttatcccaatatggaatgaaacacatgcgttccattgccaatatctgcaatgctggaattcagatggagcagatggtggaggcatcagcacaagcttgtcctagcatcccttccaatatttggagttccctccacaggggctttagtgcgtaa

SEQ ID NO: 194 - protein, 480 aa, Solanum lycopersicum
MVHVAGVFILVGIAVLAAVEGRNVLKLPSEASRFFDDADDSVGTRWAVLLAGSNGYWNYRHQADVCHAYQLLRKGGLKDENIIVFMYDDIAHHEENPRPGVIINSPAGEDVYEGVPKDYTGDDVNVHNFLAVLLGNKTALTGGSGKVVNSGPNDHIFIFYSDHGGPGVLGMPTNPYLYADDLIAVLKKKHAPGTYKSLVLYIEACESGSIFEGLLPNGLNIYATTASNAEESSWGTYCPGEYPSPPPEYETCLGDLYAVSWMEDSEMHNLRTENLRQQYHLVKKRTANGNTAYGSHVMQFGDLQLSMESLFRFMGTNPANDNYTYVDDNSLLASSKAVNQRDADLLHFWDKFRKAPEGSARKVEAQKQFTEAMSHRMHLDERIALVGKLLFGIQKGPEVLKHVRSAGQPLVDDWACLKSFVRTFESHCGSLSQYGMKHMRSIANICNAGIQMEQMVEASAQACPSIPSNIWSSLHRGFSA

SEQ ID NO: 195 - DNA, 1473 bp, Nicotiana tabacum
atgattcgtcacattgccggtactctgttcataattggactcgcacttaacgtcgccgtttcagagagccgtaatgttttgaaacttccgtcagaagtttctagattcttcggtgccgataagagtaatgtcggcgatgatcatgatgacgactccgtcggtaccagatgggctatcctgctagccggatctaacggttattggaattaccgtcaccaggctgatatatgccacgcatatcaactgttgaagaagggtggtctcaaagatgagaacattgttgtgtttatgtacgatgacattgctaacaatgaagagaatccaagaccaggagttatcattaatagccctcatggtgaggatgtttacaaaggagttcctaaggattacactggggatgatgttactgttaacaacttttttgctgctctccttgggaacaaaactgctcttagtggaggcagcggaaaggtggtgaatagtggtccgaatgatcatatcctcatcttctatagtgatcatggcggccctggagtgcttgggatgcctaccgatccttacctctatgcaaacgatctgattgacgtgttgaagaagaagcatgcttccggaacatataaaagcttggtattttaccttgaagcttgtgagtctggtagtatatttgagggtcttcttcctgaaggtttaaatatctatgccacaacagcatcaaatgctgaagagagtagctggggaacctattgtcctggagagtatcccagtcctcctattgaatatgagacttgcctgggtgacttgtacagtatttcctggatggaggacagtgaattacacaacctgcggactgaaagtctgaagcagcagtatcacctggtcagagagagaactgctactgggaatcctgtttatggttcacatgtcatgcaatatggtgatctacatctcagcaaggatgctctatacttatatatgggtacaaatcctgctaatgataattatacttttatggatgacaattccttgcgagtatcaaaggccgttaaccagcgtgatgcagatcttctgcatttttggtacaagttccgcaaggctcctgagggctctgtgaggaaaattgaggctcagaaacagttaaatgaagcaatatcacatagagtgcacttggacaacagcatagcccttgtcggtaaacttctatttggaattaaaaaaggtccagaggtgctaagtagtgtccgccctgctggtcagcctcttgttgatgactgggactgccttaaatcctttgtaagaacatttgagacacattgtggatcgttatcccagtatggaatgaaacatatgcgctccattgctaacatatgcaacgttggaattaagatggcgcagatggtggaggcatcagcacaagcttgtcccagctttgcatccaatacttggagttccctccagaggggttttagtgcatga

SEQ ID NO: 196 - protein, 490 aa, Nicotiana tabacum
MIRHIAGTLFIIGLALNVAVSESRNVLKLPSEVSRFFGADKSNVGDDHDDDSVGTRWAILLAGSNGYWNYRHQADICHAYQLLKKGGLKDENIVVFMYDDIANNEENPRPGVIINSPHGEDVYKGVPKDYTGDDVTVNNFFAALLGNKTALSGGSGKVVNSGPNDHILIFYSDHGGPGVLGMPTDPYLYANDLIDVLKKKHASGTYKSLVFYLEACESGSIFEGLLPEGLNIYATTASNAEESSWGTYCPGEYPSPPIEYETCLGDLYSISWMEDSELHNLRTESLKQQYHLVRERTATGNPVYGSHVMQYGDLHLSKDALYLYMGTNPANDNYTFMDDNSLRVSKAVNQRDADLLHFWYKFRKAPEGSVRKIEAQKQLNEAISHRVHLDNSIALVGKLLFGIKKGPEVLSSVRPAGQPLVDDWDCLKSFVRTFETHCGSLSQYGMKHMRSIANICNVGIKMAQMVEASAQACPSFASNTWSSLQRGFSA

SEQ ID NO: 197 - DNA, 1467 bp, Saccharum officinarum
atggtgaccgctcgcctccgcctcgcgctgctactactctccgtgttcctctgctccgcgtgggcgcgcccacgcctcgagccgaccatccgcctgccgtccgagcgcgccgcggcggcggccggcgacgaaacggacgacgccgtcgggacacggtgggccgtgctcgtcgccggctccagcggctactacaactaccgccaccaggcagacatctgccatgcgtaccagattatgaagaagggaggactcaaggacgagaacataattgtcttcatgtacgatgacatcgcgcatagcgcagagaatccgaggcccggtgtcgtcatcaaccatccccagggtggcgatgtctatgctggggttccaaaggattacactgggcgacaggtcagtgtcaacaatttcttcgctgttctgcttggcaacaaaactgctctgacaggtgggagcggcaaggttgtggacagtggccccaatgatcatatctttgttttctacagtgaccatggaggtcctggtgtccttggaatgcctacgtatccatatctctacggtgatgacctcgtagatgtcctgaagaagaagcatgctgctgggtcctacaaaagcctggtcttttaccttgaagcatgcgaatctgggagcatctttgagggcctcctgccagatgacatcaatgtgtatgcgaccaccgcgtcaaatgcagaggagagcagctgggggacgtactgccctggcgagttcccaagccctccaccggagtatgacacttgcttgggagacctgtatagtgtttcttggatggaagacagtgatttccacaatctgcgaactgaatctctcaagcagcagtacaagttggtcaaggataggacagcggctcaggatacattcagctatggttcccatgtgatgcaatatggttcattggagttgaatgttcagaaattgttttcgtacattggcacaaaccctgctaacgatggcaacacatttgtagaagataactcattgccatcattttcaaaagctgttaatcagcgtgatgctgatcttgtctacttctggcagaagtaccggaaattggctgatggctcatctaagaaaaatgaagctcggaaggaattgcttgaagtgatgtcccaccggtctcatgttgacaacagtgttgaactcattggaagccttctctttggctctgaggacggtccaagggttctgaaagccgtccgtgcagctggtgaacctctggttgatgattggagttgcctcaagtccatggttcgtacttttgaggcgcaatgtgggtcgttggcgcagtatgggatgaagcacatgagaaccttcgcaaacatctgcaacgctggcatccttcctgaagcagtgtcaaaggttgccgctcaggcttgcaccagcattccttccaacccctggagctctatcgacaagggttttagcgcctaa

SEQ ID NO: 198 - protein, 488 aa, Saccharum officinarum
MVTARLRLALLLLSVFLCSAWARPRLEPTIRLPSERAAAAAGDETDDAVGTRWAVLVAGSSGYYNYRHQADICHAYQIMKKGGLKDENIIVFMYDDIAHSAENPRPGVVINHPQGGDVYAGVPKDYTGRQVSVNNFFAVLLGNKTALTGGSGKVVDSGPNDHIFVFYSDHGGPGVLGMPTYPYLYGDDLVDVLKKKHAAGSYKSLVFYLEACESGSIFEGLLPDDINVYATTASNAEESSWGTYCPGEFPSPPPEYDTCLGDLYSVSWMEDSDFHNLRTESLKQQYKLVKDRTAAQDTFSYGSHVMQYGSLELNVQKLFSYIGTNPANDGNTFVEDNSLPSFSKAVNQRDADLVYFWQKYRKLADGSSKKNEARKELLEVMSHRSHVDNSVELIGSLLFGSEDGPRVLKAVRAAGEPLVDDWSCLKSMVRTFEAQCGSLAQYGMKHMRTFANICNAGILPEAVSKVAAQACTSIPSNPWSSIDKGFSA

SEQ ID NO: 199 - DNA, 1461 bp, Zea mays
atggtggccgctcgcctccgcctcgcgctgctactctccgtctgcctctgctccgcgtgggcgcgcccacgcctcgagacggccatccgcctgccgtcgcagcgcgcggcggcggccgacgaaacggacgacggcgccgtcgggacccgctgggctgtgctcatcgcaggctccagcggctactacaactaccgccaccaggcggacatctgccatgcataccagatcatgaagaagggcggactcaaggatgagaacatcattgtcttcatgtacgatgacatcgcgcatagcccggagaatccgaggcctggtgtcatcatcaaccatccccagggtggcgacgtctatgctggggtgccaaaggattacacggggcgagatgtcaacgtcgacaatttcttcgctgttctgcttggcaacaaaactgctctcaggggtgggagcggcaaggttgtggacagtggccccgatgatcatatctttgttttctacagtgaccatgggggtcctggtgtccttggaatgcctacgtatccatatctctatggtgatgacctcgtagatgtcctgaagaagaagcatgctgccgggacctacaaaagcctggtcttttaccttgaagcatgcgaatctgggagcatctttgagggcctcctgccgaatgacatcaatgtgtatgcgaccaccgcgtcaaatgcagaggagagcagctgggggacatactgccctggcgagttcccgagccctccaccggagtatgacacctgcttgggtgacctgtacagtgttgcttggatggaagacagtgatttccacaatctgcgaactgaatctctcaagcagcagtacaagttggtcaaggataggacagcggttcatgacacgttcagctatggttcccatgtgatgcaatatggcgcactggagttgaatgttcagcatttgttttcgtacattggcacagaccctgctaacgatggcaacacgtttatagaagataactcactgccatcgttctcaaaagccgtcaatcagcgcgacgctgaccttgtctacttctggcagaagtaccggaaatttgctgatagcccgcctgcgaaaagcgaggctcggaaggaactgcttgaagtgatggcccacaggtctcatgttgacagcagcgttgagctcatcggaagccttctctttggctctgaggacggtccaagggttctgaaagccgtccgtgcacctggtgaacctctggttgatgattggagctgcctcaagtccatagttcgcacttttgaggcgcgatgcgggtccttggcgcagtatgggatgaagcacatgcgatccttcgcgaacatgtgcaacgctggcatccttcctgaagcagtgtcgaaggtggccgctcaggcctgcagcagcattccgtccaacccctggagctctatccacaagggttttagcgcttaa

SEQ ID NO: 200 - protein, 486 aa, Zea mays
MVAARLRLALLLSVCLCSAWARPRLETAIRLPSQRAAAADETDDGAVGTRWAVLIAGSSGYYNYRHQADICHAYQIMKKGGLKDENIIVFMYDDIAHSPENPRPGVIINHPQGGDVYAGVPKDYTGRDVNVDNFFAVLLGNKTALRGGSGKVVDSGPDDHIFVFYSDHGGPGVLGMPTYPYLYGDDLVDVLKKKHAAGTYKSLVFYLEACESGSIFEGLLPNDINVYATTASNAEESSWGTYCPGEFPSPPPEYDTCLGDLYSVAWMEDSDFHNLRTESLKQQYKLVKDRTAVHDTFSYGSHVMQYGALELNVQHLFSYIGTDPANDGNTFIEDNSLPSFSKAVNQRDADLVYFWQKYRKFADSPPAKSEARKELLEVMAHRSHVDSSVELIGSLLFGSEDGPRVLKAVRAPGEPLVDDWSCLKSIVRTFEARCGSLAQYGMKHMRSFANMCNAGILPEAVSKVAAQACSSIPSNPWSSIHKGFSA

SEQ ID NO: 201 - DNA, 1446 bp, Zea mays
atggtggccgatcgcctccgcctcgcgctgctgctctccgcgtgcctctgctccgcgtgggcgcgcccacgcctcgagccgaccatccgcctgccgtccgaccgcgcggcggccgacgacgccgtcgggacccggtgggccgtgctcatcgccggctccaacggctactacaactaccgccaccaggcggacatctgccatgcataccagatcatgaagaagggcggacttaaggacgagaacatcgttgtcttcatgtacgatgacatcgcgcatagcccggaaaatccgaggcctggtgtcatcataaatcatccccagggtggcgacgtctatgctggggtgccaaaggattacactgggcgagatgtcaacgtcgacaatttcttcgctgttctgcttggcaacaaaactgctctcaggggtgggagcggcaaggttgtggacagtggccccaatgatcatatatctgttttctacagtgaccatgggggtcctggcgtccttggaatgcctacgtatccatatctctatggtgatgacctcgtagatgtcctgaagaagaagcatgctgccgggacctacaaaagcctggtcttttaccttgaagcatgcgaatctgggagcatctttgagggcctcctgccgaatgacataaatgtgtatgcgaccaccgcgtcaaatgcagaggagagtagctgggggacgtactgccctggcgagttcccgagccctccgccggagtatgacacttgcttgggagacctgtatagtgttgcttggatggaagacagtgatttccacaatctgcgaactgaatctctcaagcagcaatacaacttggtcaaggataggacagcggttcaggatacattcagctatggctcccatgtgatgcaatatggttcattggggttgaatgttaagcatctgttttcgtacattggcacaaaccctgctaacgatgacaacacgttcatagaagacaactcgttgccatcattctcaaaggctgttaatcagcgcgacgctgaccttgtctacttctggcagaagtaccggaaattggcagacagctcacctgagaaaaatgaagctcggagggagttgcttgaagtgatggcccacaggtctcatgttgacagcagcgttgagctcattggaagccttctctttggctctgaggacggtccaagggttctgaaagccgtccgtgcagctggtgagcctctggtcgatgattggagctgtctcaagtccacggttcgtacttttgaggcgcaatgtgggtcgttggcgcagtatgggatgaagcacatgcggtccttcgcaaacatctgcaacgctggcatccttcctgaagcagtgtcgaaggtcgctgctcaggcttgcaccagcattccttccaacccctggagttctatccacaagggttttagcgcctaa

SEQ ID NO: 202 - protein, 481 aa, Zea mays
MVADRLRLALLLSACLCSAWARPRLEPTIRLPSDRAAADDAVGTRWAVLIAGSNGYYNYRHQADICHAYQIMKKGGLKDENIVVFMYDDIAHSPENPRPGVIINHPQGGDVYAGVPKDYTGRDVNVDNFFAVLLGNKTALRGGSGKVVDSGPNDHISVFYSDHGGPGVLGMPTYPYLYGDDLVDVLKKKHAAGTYKSLVFYLEACESGSIFEGLLPNDINVYATTASNAEESSWGTYCPGEFPSPPPEYDTCLGDLYSVAWMEDSDFHNLRTESLKQQYNLVKDRTAVQDTFSYGSHVMQYGSLGLNVKHLFSYIGTNPANDDNTFIEDNSLPSFSKAVNQRDADLVYFWQKYRKLADSSPEKNEARRELLEVMAHRSHVDSSVELIGSLLFGSEDGPRVLKAVRAAGEPLVDDWSCLKSTVRTFEAQCGSLAQYGMKHMRSFANICNAGILPEAVSKVAAQACTSIPSNPWSSIHKGFSA

SEQ ID NO: 203 - DNA, 1485 bp, Zea mays
atggctgtgcggtggtgcctcctcctgctcgtgttagtgttggctgcggccgcggcttgcgcggagaagggggagtgggacccggtgattcggatgcctggggagaaggagcctgcagggtcgcactcgcacagcggcgagggattcgatggggaggtggatgacgccgtcgggacgaggtgggcagtgctcgttgccgggtcctccggctacggcaactacaggcaccaggctgatatatgtcatgcgtaccagatactgcaaaaaggaggcataaaagaggagaacattgtggtgtttatgtatgatgacattgccaatagcgcactcaacccaaggcagggggttatcatcaaccacccagagggcgaagatgtttatgctggtgttccaaaggactacactggggaccaagtcactactaagaacttctatgcagttctcttgggcaacaaaactgcagtcactggaggcagcaggaaggtcatcaatagcaaaccagatgaccatatttttatctattactcagatcacgggggccctggtgttcttggtatgcccaatctaccatatctttatgctggtgacttcatgaaggtgttaagagaaaaacatgcttcaaacagctatgccaaaatggttatatatattgaagcatgtgaaagtggcagtatatttgagggattaatgccagaagaccttaatatttatgtcacgacggcatccaatgcagaagaaagtagctggggtacatactgtccaggaatggaaccaccgcctccttctgagtacattacctgcctaggtgatctatatagtgtctcttggatggaagacagtgagactaacaatctgaaggaggaaacagtaaaggaacaatatgaagtggtgaagaagcgtacttcagacttcaatagctatggtgcaggctctcacgtcatggaatatggtgacaagaccttcaaggaagagaagctttacctttatcaaggttttgatcctgcaaatgccaatgtcacaaataagctgctttggtcaggccaagaggctgtggtcaaccaaagggatgcagatattctcttcctatggaagaggtatgagctcttacatgagaagtctgaagagaagcaggaagttctgagggagatcaccggaacagtaaggcataggaagcatctggacaacagcatcaacttcatcggaaagcttctcttcggggctgagaaagggccttccacacttgaggccgtcagacctcccggccagccactcgtcgatgattgggactgcttgaagcaaatggtacggatcttcgaatcccattgcggatcgctcactcagtacggtatgaggcatatgagggcgttcgcaaatatatgcaacagtggcacgcctggcgcttcgatgaagcgagcgagcatgggtgcttgtggcggctacaactcggcgagatggagcccgttggctcagggctacagcgcttga

SEQ ID NO: 204 - protein, 494 aa, Zea mays
MAVRWCLLLLVLVLAAAAACAEKGEWDPVIRMPGEKEPAGSHSHSGEGFDGEVDDAVGTRWAVLVAGSSGYGNYRHQADICHAYQILQKGGIKEENIVVFMYDDIANSALNPRQGVIINHPEGEDVYAGVPKDYTGDQVTTKNFYAVLLGNKTAVTGGSRKVINSKPDDHIFIYYSDHGGPGVLGMPNLPYLYAGDFMKVLREKHASNSYAKMVIYIEACESGSIFEGLMPEDLNIYVTTASNAEESSWGTYCPGMEPPPPSEYITCLGDLYSVSWMEDSETNNLKEETVKEQYEVVKKRTSDFNSYGAGSHVMEYGDKTFKEEKLYLYQGFDPANANVTNKLLWSGQEAVVNQRDADILFLWKRYELLHEKSEEKQEVLREITGTVRHRKHLDNSINFIGKLLFGAEKGPSTLEAVRPPGQPLVDDWDCLKQMVRIFESHCGSLTQYGMRHMRAFANICNSGTPGASMKRASMGACGGYNSARWSPLAQGYSA

SEQ ID NO: 205 - DNA, 1828 bp, Oryza sativa
gcttgagtcatagggagaaaacaaatcgatcatatttgactcttttccctccatctctcttaccggcaaaaaaagtagtactggtttatatgtaaagtaagattctttaattatgtgagatccggcttaatgcttttcttttgtcacatatactgcattgcaacaattgccatatattcacttctgccatcccattatatagcaactcaagaatggattgatatatcccctattactaatctagacatgttaaggctgagttgggcagtccatcttcccaacccaccaccttcgtttttcgcgcacatacttttcaaactactaaatggtgtgttttttaaaaatattttcaatacaaaagttgctttaaaaaattatattgatccatttttttaaaaaaaatagctaatacttaattaatcacgtgttaaaagaccgctccgttttgcgtgcaggagggataggttcacatcctgcattaccgaacacagcctaaatcttgttgtctagattcgtagtactggatatattaaatcatgttctaagttactatatactgagatgaatagaataagtaaaattagacccaccttaagtcttgatgaagttactactagctgcgtttgggaggacttcccaaaaaaaaaagtattagccattagcacgtgattaattaagtactagtttaaaaaacttaaaaaataaattaatatgattctcttaagtaactctcctatagaaaacttttacaaaattacaccgtttaatagtttggaaaatatgtcagtaaaaaataagagagtagaagttatgaaagttagaaaaagaattgttttagtagtatacagttataaactattccctctgttctaaaacataagggattatggatggattcgacatgtaccagtaccatgaatcgaatccagacaagttttttatgcatatttattctactataatatatcacatctgctctaaatatcttatatttcgaggtggagactgtcgctatgtttttctgcccgttgctaagcacacgccacccccgatgcggggacgcctctggccttcttgccacgataattgaatggaacttccacattcagattcgataggtgaccgtcgactccaagtgctttgcacaaaacaactccggcctcccggccaccagtcacacgactcacggcactaccacccctgactccctgaggcggacctgccactgttctgcatgcgaagctatctaaaattctgaagcaaagaaagcacagcacatgctccgggacacgcgccacccggcggaaaagggctcggtgtggcgatctcacagccgcatatcgcatttcacaagccgcccatctccaccggcttcacgaggctcatcgcggcacgaccgcgcacggaacgcacgcggccgacccgcgcgcctcgatgcgcgagcccatccgccgcgtcctccctttgcctttgccgctatcctctcggtcgtatcccgtttctctgtcttttgctccccggcgcgcgccagttcggagtaccagcgaaacccggacacctggtacacctccgccggccacaacgcgtgtcccccctacgtggccgcgcagcacatgcccatgcgcgacacgtgcacctcctcatccaaactctcaagtctcaacggtcctataaatgcacggatagcctcaagctgctcgtcacaaggcaagaggcaagaggcaagagcatccgtattaaccagccttttgagacttgagagtgtgtgtgactcgatccagcgtagtttcagttcgtgtgttggtgagtgattccagccaagtttgcg

SEQ ID NO: 206 - DNA, 54 bp, Artificial sequence
  primer: forward primer
ggggacaagtttgtacaaaaaagcaggcttaaacaatggccacaacgatgacac

SEQ ID NO: 207 - DNA, 50 bp, Artificial sequence
  primer: reverse primer
ggggaccactttgtacaagaaagctgggtcggtttagggtttctatgcac

SEQ ID NO: 208 - protein, 425 aa, Arabidopsis thaliana
SNSGTRWAVLVAGSSGYWNYRHQADICHAYQLLRKGGLKEENIVVFMYDDIANNYENPRPGTIINSPHGKDVYQGVPKDYTGDDVNVDNLFAVILGDKTAVKGGSGKVVDSGPNDHIFIFYSDHGGPGVLGMPTSPYLYANDLNDVLKKKHALGTYKSLVFYLEACESGSIFEGLLPEGLNIYATTASNAEESSWGTYCPGEEPSPPPEYETCLGDLYSVAWMEDSGMHNLQTETLHQQYELVKRRTAPVGYSYGSHVMQYGDVGISKDNLDLYMGTNPANDNFTFADANSLKPPSRVTNQRDADLVHFWEKYRKAPEGSARKTEAQKQVLEAMSHRLHIDNSVILVGKILFGISRGPEVLNKVRSAGQPLVDDWNCLKNQVRAFERHCGSLSQYGIKHMRSFANICNAGIQMEQMEEAASQACT

SEQ ID NO: 209 - protein, 5 aa, Artificial sequence
  motif caspases
  VARIANT (2)..(2): Xaa is Ala or Gly
EXCES

SEQ ID NO: 210 - DNA, 1128 bp, Oryza sativa
atgctgcttccgccgcatccaggcagaacattaccagcctatcatggagacaacagatttcttcttggagcttgtttcctgagtaaactgcctatgctgcgcccaatgaagttgtctttggtatgcagtgctaatcccaacaaccataggtcaagaagttcggatatcacacgccatcagaagggtggatcagctcggaggaaaagtaagccttaccaggagaaagatgactctgagaatattgatgaattcgatactgatattatgtcctccaaaaatggaccacccatctctttgacaagcaattcccgtcctcaagcaacatcagtcccaggggaaagagagaaggagatagtagagttgtttaaaagggttcaagcacaattgcgagcaaggggaaaagggaaggaggagaagaagcctgaacaagcaaaagcacagggtgagaggggcagtgttgactcccttctaaatctgcttaggaagcactcagtggaccaacgaaggaagagcggtgatgagaaagaacagagtgttgaccaaacaaagagaagcaatgaatctggaaataaacaaaattcaagcatcttcataaagaatgacactcaggaagaacagaaaaagccacatcctgcagccttcaaaaggccagcttcaaattttaggcgaagatcccctgttcctaatgtaaagttccagcctgttaccaatgttgatgccgaacgagtcatcaataacatcaatgatgccgtacaagaggctaagccaactttggaaaataaggctgctacagatgaaccagactcggtttctacattcgaacctaattctgtaatagaaccagaaaacctatctttggatgaccttgatcatatttcagatgatgaacctgatgcttctgatactgatgaacccagtggagaatatgatgagccatctttgcaaatcccaagtgttccaattattgatgaatctcatgatacgacactgaaatcttccttaggaggtcctgatttaagcactttgaaggtcacagaactaagagaacttgcgaaatctcgaggaatcaaaggatattccaagatgaagaagaatgacctggttgaactgctgagcaacatggcttga

SEQ ID NO: 211 - protein, 375 aa, Oryza sativa
MLLPPHPGRTLPAYHGDNRFLLGACFLSKLPMLRPMKLSLVCSANPNNHRSRSSDITRHQKGGSARRKSKPYQEKDDSENIDEFDTDIMSSKNGPPISLTSNSRPQATSVPGEREKEIVELFKRVQAQLRARGKGKEEKKPEQAKAQGERGSVDSLLNLLRKHSVDQRRKSGDEKEQSVDQTKRSNESGNKQNSSIFIKNDTQEEQKKPHPAAFKRPASNFRRRSPVPNVKFQPVTNVDAERVINNINDAVQEAKPTLENKAATDEPDSVSTFEPNSVIEPENLSLDDLDHISDDEPDASDTDEPSGEYDEPSLQIPSVPIIDESHDTTLKSSLGGPDLSTLKVTELRELAKSRGIKGYSKMKKNDLVELLSNMA

SEQ ID NO: 212 - DNA, 1122 bp, Glycine max
atgtcgcaaacgctgcacgctttcgtcgccaaaaaccttggatgtggaatggcatacggcaagtgtctcccatgttcaggtgtttctggaagaactgctgctgtatattcctactcttctctaggtcatcgcagaattcattcccatgtccaagttagaggactaaagtgtggctttaggggtgcatcttttgtatgtgaagcaaagaggaacccagatttctcaaggcaaaacaagcatgggtcctccagaagcagaaatcggaatagtgatgggagagacagctttgagagctttgacgacgatatgttttctttaaaaaatggaccacctgtgtctctttcaacctcaggaaaattccaggccacttcagcccctggtcctagggagaaggagattgttgagctatttaggaaggtccaggctcggctgcgtgagagggctgcctccaaagaagaaaagaaagttgaagcctcccgagcacaaagcaaagagaacagtactgtggattcccttctcaaactactgaagaaacattcagttgagcaagtgaagagaagtagtggaggcagaggaaaagattttagttcagaccagttgcaagaaagtaaccaatacaatggaggacggaactctaaaatttctgatttagatagttctccaaaggatgagccccaagaggacattgtcttctcttcctcggtagccaggcctcggtcaaatttccaaagaaggtctcccgttcctcgtttaaaataccagcatgtctctaacgatgagaatgaaatgactgtagtgccagtaggtagtgaggatacagagaacaatcaggatcagatagatttgaagcttgatgacgaagctgaatctgactttgaatcggatgttgattcaaaggatgagtttttcttcccaaacatagggatggctgaattgtctgaggatgatgattctgagcaaacctataatgatgagagtgtggaggagcagccggcagctcaacacaaggatttgagtgcactgaagctgtccgaattgagggcacttgcaaagactcgtggcctgaaaggattctcaaaaatgaagaagagtgacctcgtggagttgctaactgagacctga

SEQ ID NO: 213 - protein, 373 aa, Glycine max
MSQTLHAFVAKNLGCGMAYGKCLPCSGVSGRTAAVYSYSSLGHRRIHSHVQVRGLKCGFRGASFVCEAKRNPDFSRQNKHGSSRSRNRNSDGRDSFESFDDDMFSLKNGPPVSLSTSGKFQATSAPGPREKEIVELFRKVQARLRERAASKEEKKVEASRAQSKENSTVDSLLKLLKKHSVEQVKRSSGGRGKDFSSDQLQESNQYNGGRNSKISDLDSSPKDEPQEDIVFSSSVARPRSNFQRRSPVPRLKYQHVSNDENEMTVVPVGSEDTENNQDQIDLKLDDEAESDFESDVDSKDEFFFPNIGMAELSEDDDSEQTYNDESVEEQPAAQHKDLSALKLSELRALAKTRGLKGFSKMKKSDLVELLTET

SEQ ID NO: 214 - DNA, 640 bp, tagetes spp
aaagcacaaccaccagcagaaacaataaagatttcatgttagacaaccaacccgagcagaacagttcatttacagaagataaaagtcaaaacgacttgaataaccaggtcacacacgaggtccaagctactgaaaaccgatctacaagacctgtatcaaatttccaaaagaggtcgccaatttctagcttcaaatacaaaccagttttgactggtgaagagtctttcacccctgaaccatttaaaaggaaagaagcaagacatgagcctgagtcaacacctgaggtcaaaatcaagactgggtctgagccagaagttgaaagtcaagcctttgatgggtttgatgaaagttcagatgatgacattgaagaggttgctgatgagattgacgattcagaagaaccaaatgcgattgaagataaggatttgagcagcatgaagctggttgagttaagagcagtggctaaatcaagaggcatcaaggggttgtctaagctgaaaaaagccgagttattggagttgctgactagttgaaagtttacatgttatggaaccttttcattataatgtaccatagaatttgagttgttcttttgatcttttctatctttctatatttatgtgatgttattatctttatg

SEQ ID NO: 215 - protein, 172 aa, tagetes spp
SRNNKDFMLDNQPEQNSSFTEDKSQNDLNNQVTHEVQATENRSTRPVSNFQKRSPISSFKYKPVLTGEESFTPEPFKRKEARHEPESTPEVKIKTGSEPEVESQAFDGFDESSDDDIEEVADEIDDSEEPNAIEDKDLSSMKLVELRAVAKSRGIKGLSKLKKAELLELLTS

SEQ ID NO: 216 - DNA, 996 bp, Brassica napa
gggtcgacaacgaaggagctttttagaatagttcaagctcggctgcgagctcgagcagcgaccaagatggaagataaaaaggcacaagaagaagaagaagaagcttctaaaggacggggaaaagaaagtgaaactgttgactctcttcttaagttactaagaaagcattcgggagagcagagcaaaaaagttaacagttttaacagccatggagacagttcgctacgaggagatcctgtggacaggaggcaagatcgcagcggaggaaaccttgtcaagtcatggaccaaagatcataatgcatcatcatcatcatcatcctttaccaggccagcgtcaagcttcagaagaaagtcgccagtaccaagatttgaatcacctcctccgacttattctaatgaggcaacttttgatgaggcatcgagttacagcgtgacttggacccataagaaggatacagcagagtcgcatgacgaacctgaagacgaacttcaggctgagattgcgcctgagtacgacgaacatgcacctgaatatgagtcagaacctgaccctgtggcagctattctcgaaccagagtcagatctgcatctagacgcatcatcattttaccaagaggaggagcataatgttactttagatgcgttatccgaggaggaggagtctctggatgatgctgatgaagaggttgaggaagaagctgtaaaagacgaggacttgagtacattgaagctgatggaactgagaggcatagcaaaatcaaggggactaaaagggttttcaaagatgaagaaagcccaactcgtggagttgcttagtagtgattccagctgattcgacggtgaaagaatctcaacaaataataagaacatttactctcgttagtgacagtgttgaaatgagttaatttctgtgttctttcttttacctggaaatactggccgtgatcatgtttgtttactcagattttaaactttggtttttgaagatcttcga

SEQ ID NO: 217 - protein, 255 aa, Brassica napa
MEDKKAQEEEEEASKGRGKESETVDSLLKLLRKHSGEQSKKVNSFNSHGDSSLRGDPVDRRQDRSGGNLVKSWTKDHNASSSSSSFTRPASSFRRKSPVPRFESPPPTYSNEATFDEASSYSVTWTHKKDTAESHDEPEDELQAEIAPEYDEHAPEYESEPDPVAAILEPESDLHLDASSFYQEEEHNVTLDALSEEEESLDDADEEVEEEAVKDEDLSTLKLMELRGIAKSRGLKGFSKMKKAQLVELLSSDSS

SEQ ID NO: 218 - DNA, 894 bp, Hordeum vulgare
caactctcactccattagagaacagcaaggaggtcagcttcggttctttggcagaggaagaagagagaagaaatgggagcaattctcatgcagcatcaccaaatctctcgcaatcctctacaaaaagtcatcttccccggatcatttgctctccaaagagatattgttctccatcgcgctccacgacggggttctctaccgtgctcatcttcattgacggtcagagcagaagccaacgggtactcaccttcaagaatggcggtcaagaagcacagcaaagaagagctcatagaattcttcggggccatccaggccgccattgccagggactcgcccaaggcgcccgggaggacgaggaagccgtcgtcgccggctgacacgctcgaagaggctggcacgaagatgcaaccatacgaggaactgcaccaagacgggcagccaaatttggaggacatgaaggtgcctgagctgagggacatggcgagggagagggggatgagaggttactccaagctgaagaaaggggagctgattgatcgtctgaggggtgcctggtcgtctgataattaacaagccttcctctccgagataggaacaggcagccgccagtgctggctgtttggcccaattggtgcagcttacaatcgacttttcttgcgtctgttgttttctttgttagatacagtatcttccaaagaggcagaagctctgcagttggacactaggtctgcattgttttcttgcatctatcctttgcatggtctgtttgtactccctccctacctaaataattgtagttgggaagtacagagggagtagttttgttgctttcattttcgtatcgtcaagtttctgaatttcaacccaccttacgataaaaaaaaaaaaaaaaaa

SEQ ID NO: 219 - protein, 165 aa, Hordeum vulgare
MGAILMQHHQISRNPLQKVIFPGSFALQRDIVLHRAPRRGSLPCSSSLTVRAEANGYSPSRMAVKKHSKEELIEFFGAIQAAIARDSPKAPGRTRKPSSPADTLEEAGTKMQPYEELHQDGQPNLEDMKVPELRDMARERGMRGYSKLKKGELIDRLRGAWSSDN

SEQ ID NO: 220 - DNA, 348 bp, Triticum aestivum
agcctccccgtacgaacccgactctgtgatagcaccagaagatgcatctctggacgactttgttgtctcagacgatgaatcagacgtgctagataccgatgaacccgatgagtacctggaaccattcgataatgctgatgatgttacagatagcatcccatcccatgatgacagtctggaaggtagtccttccgtggaagcttccgacctgagctcgctcaaggtcatggagctgagggagctggcgaaatctcggggactcaggggctactcgaagatgaagaagagcgacctggtcgcactactgagcgacgtgtcctgatccgtcggtggtggcaatcctgcttg

SEQ ID NO: 221 - protein, 105 aa, Triticum aestivum
SPYEPDSVIAPEDASLDDFVVSDDESDVLDTDEPDEYLEPFDNADDVTDSIPSHDDSLEGSPSVEASDLSSLKVMELRELAKSRGLRGYSKMKKSDLVALLSDVS

SEQ ID NO: 222 - DNA, 398 bp, Triticum aestivum
cggaaacaaatgccccagcacggcttacagctttacttatttttaactctaataacagggttcagctaatcgactaacaaagctaggacatgacagcaaaagggaccagcaagagatcaacgaacaacggagaaaaggttaaccctgctcatttacaacgttctatctaaaagggacttggcagaataggaaatgggaggtcgtgcacatggccatggcagaaggggagcaaaacggtgggctcgagcaggattgccaccaccggcggatcaggacacgtcgctcagtagcgcgaccaggtcgctcttcttcatcttcgagtaaccccggagtccccgagatttcgccagctccctcagctccgtcaccttgagcgagctcaggtcggaagcttctgc

SEQ ID NO: 223 - protein, 64 aa, Triticum aestivum
ASDLSSLKVTELRELAKSRGLRGYSKMKKSDLVALLSDVSDPPVVAILLEPTVLLPFCHGHVHD

SEQ ID NO: 224 - DNA, 701 bp, Zea mays
atctggacactgatgacgatcgcaagtccatcggcagtaatgccgtggatgccgtacagaaagctaagacagctcttgatgagaggactgctacagatgagcctgactccatgtctccatatgagccagattctgtaatagaaccaggaaacatttctttgaatgacctcgatgacattttagatgacgacgaagaattcgatgcagatgaaccagacgacgagtatccagaaccttctttgggaatctctgatgtcacagatacggatgagtcgcacgagaacgactccacccccacgggaagtgcggatctaagctctctgaaggttgcggagctgagagagctcgcaaagtctcgaggaatcaaagggtactcgaagaagaagaaaaacgagctggttgaagtgttgagcagcagcatggattgatgataaagtgggtgacctggcgctctgtttgaagtttgaacccactttgcttggccccctctagaaaattgtaaatgagcaaggctaactctgttccggtctgtgctgatcttttgctggttcattttgtacgcctagcttggtagccgtttagctgaattctgtggtgagtggagtaaggtagctgagagccttagctgtttgtgtactaaatcaatgcactgcatccgttctagggtgttgctcgtctgttttccgatattgtcttgttct

SEQ ID NO: 225 - protein, 151 aa, Zea mays
  UNSURE (1)..(1): Xaa can be any naturally occcurring amino acid
XLDTDDDRKSIGSNAVDAVQKAKTALDERTATDEPDSMSPYEPDSVIEPGNISLNDLDDILDDDEEFDADEPDDEYPEPSLGISDVTDTDESHENDSTPTGSADLSSLKVAELRELAKSRGIKGYSKKKKNELVEVLSSSMDDDKVGDLAL

SEQ ID NO: 226 - DNA, 1014 bp, Zea mays
atcaagactagcttgtttgaccaccagcttccctaccttctcctgcaatcccaagagaagatgaattggtttgtatcatcattcatttgcctgtggcaggaagtggatggaagcaggcggtcattggaaggcaggaacagggggctttgcttggtgttctttggaggagaaagaagagcaaagaaatgggaggcttgctcttgtcgcatcaccaaacctttccaaattctttgcaagcttccatccccggacctctctctcttcacaaaggcgaccgcaaaaacctccattgcttggcacctgatgtgcacctcctctgttccctgcggcaaggctttccacgctcatcttggtcggccgtcatcagatcagaagccagcggcaacgcggtggcgtcgccaggcacggtcatcaagcgtagcaaggaggagctcatcaccttcttcagagacatacagacatccattgccgagtgctcgcgtaaagcttccaagaggacgaggaagcagccgcctgatctgttccaagaggtccgcaggagggaggaacagtcacacggtggaggagatagcggcaccgacgacgtttcagagggaccgaggaaagtgaagagtcttgaggacatgaacgtggctggattgagagagttggcgagggccagaaggatgaggggttactccaagcttaagaagggcgagctcattgatcggttgagaggggctactacgtaataaactaccatgatgcagagcagcttcgcagttaatagggacacatgttcttttcgaacgtatgatgagattaccgatcaaaaaattgtatgatgatgagattaccgactttccaaacgatctagtcagttcattgataagaactagaacaatgtgtgtagttattatactatagaaccggtggagctgtattgttgtactacgccgaaacttttgtgtaggcatggcaatctcctgttgttacgtaagttactttgttatgtacggaattagtttctctaaa

SEQ ID NO: 227 - protein, 189 aa, Zea mays
  UNSURE (22)..(22): Xaa can be any naturally occuring amino acid
  UNSURE (146)..(146): Xaa can be any naturally occuring amino acid
  UNSURE (172)..(172): Xaa can be any naturally occuring amino acid
SCRITKPFQILCKLPSPDLSLXHKGDRKNLHCLAPDVHLLCSLRQGFPRSSWSAVIRSEASGNAVASPGTVIKRSKEELITFFRDIQTSIAECSRKASKRTRKQPPDLFQEVRRREEQSHGGGDSGTDDVSEGPRKVKSLEDMNVXWIERVGEGQKDEGYSKLKKGELIDRXERGYYVINYHDAEQLRS

SEQ ID NO: 228 - DNA, 688 bp, Triticum aestivum
gaggcagaaagctaagacagttcttgatgagaggactgttacagatgagcctgactccatgtctccgtatgaacctgattctgtaatagaaccagaaaatatttctttggaagaccttgatgacattttagatgacgatgaagaatctgatacagatgaaccagacgatgagtatccagaaccttctttggaaatcactgatgttacagatacagatgaattgcacgagaacaactccacggaaagttcagatctaacctctctgaaggttgcagagctgagagagcttgcaaagtcccgaggaatcaaaggctattcaaagatgaagaaaaacgagctgattgaagtggtgagcagcagcatggcttgatgataagcgggtgatattgtcaacctttcagtcccactttgctgattgaagtggtgagcagcagcatggctattccatttgaacccactttgcttggcctgatccgctgcctttcagtcccgtagaaaattgtaaatgagcgaggctaacattgttctggtctgtgctgatcttttgctggttctcattttgtacgcctagtttgctagacatttagctgaattgtgtgccgagtggagtaaggtagctgagagcctgagatgctgtttgtgtactaaatgaatgcaccacatctgttctaggtgttgttaaaaaaaa

SEQ ID NO: 229 - protein, 122 aa, Triticum aestivum
RQKAKTVLDERTVTDEPDSMSPYEPDSVIEPENISLEDLDDILDDDEESDTDEPDDEYPEPSLEITDVTDTDELHENNSTESSDLTSLKVAELRELAKSRGIKGYSKMKKNELIEVVSSSMA

SEQ ID NO: 230 - DNA, 1902 bp, Oryza sativa
atggccatctgtatgtccaacttctatgtatctatatatcttgtgtactgcgaacccttcaatctgaaacatttagttttcgtccttattcattactatgctattgtttcttgggtttcaggcagaacattaccagcctatcatggagacaacagatttcttcttggagcttgtttcctgagtaaactgcctatgctgcgcccaatgaagttgtctttggtatgcagtgctaatcccaacaaccataggtcaagaagttcggatatcacacgccatcagaagggtggatcagctcggaggaaaagtaagccttaccaggagaaagatgactctgagaatattgatgaattcgatactgatattatgtcctccaaaaatggaccacccatctctttgacaagcaattcccgtcctcaagcaacatcagtcccaggggaaagagagaaggagatagtagagttgtttaaaagggttcaagcacaattgcgagcaaggggaaaagggaaggaggagaagaagcctgaacaagcaaaagcacagggtgagaggggcagtgttgactcccttctaaatctgcttaggaagcactcagtggaccaacgaaggaagagcggtgatgagaaagaacagagtgttgaccaaacaaagagaagcaatgaatctggaaataaacaaaattcaagcatcttcataaagaatgacactcaggaagaacagaaaaagccacatcctgcagccttcaaaaggccagcttcaaattttaggcgaagatcccctgttcctaatgtaaagttccagcctgttaccaatgttgatgccgaacgagtcatcaataacatcaatgatgccgtacaagaggctaagccaactttggaaaataaggctgctacagatgaaccagactcggtttctacattcgaacctaattctgtaatagaaccagaaaacctatctttggatgaccttgatcatatttcagatgatgaacctgatgcttctgatactgatgaacccagtggagaatatgatgagccatctttgcaaatcccaagtgttccaattattgatgaatctcatgatacgactctgaaatcttccttaggaggtcctgatttaagcactttgaaggtcacagaactaagagaacttgcgaaatctcgaggaatcaaaggatattccaagatgaagaagaatgacctgagccaaggtactgattgggaggatttcctgggaattgtctgcctcccgattatcaattcaacaatcagcttcattaaggaaaacaatgcaggcgatgcagctgctgcactcatgtcccggttggcgctaaaaacaaaggttcttagagatgagcagtggcaagagcttgatgcttccacattggtacctggggatataatcagcatcaggtttggtgacattgtccctgcagatgcgtgcctacttgagggagatcctctgaaaatgaattgccacacgccgttcatgcgaaagatgtcgatcactggaattcagctctcactggtgaatcccttcctgtcaccaaaagaaccggggaccatagtgttcactggctcaacatgcaagcatggtgagattgaagctgttgtcattgcaactgggatacactctttctttggcaaggcagctcatctagtggactccactgaggttgttgggcattttcagaagctttgcgttttcttctccttatcacaaagaatgcaaggactgccccagagcttccaccaaaacatgaaccaccattgtcttgacctgggctgtttggacggtttggtggaggggggagctgtatatgatggaggtggtggatttccgtcaattctgtacacaaggatcataataggtcagtgtacaactctcatttttgcatgttcataa

SEQ ID NO: 231 - protein, 633 aa, Oryza sativa
MAICMSNFYVSIYLVYCEPFNLKHLVFVLIHYYAIVSWVSGRTLPAYHGDNRFLLGACFLSKLPMLRPMKLSLVCSANPNNHRSRSSDITRHQKGGSARRKSKPYQEKDDSENIDEFDTDIMSSKNGPPISLTSNSRPQATSVPGEREKEIVELFKRVQAQLRARGKGKEEKKPEQAKAQGERGSVDSLLNLLRKHSVDQRRKSGDEKEQSVDQTKRSNESGNKQNSSIFIKNDTQEEQKKPHPAAFKRPASNFRRRSPVPNVKFQPVTNVDAERVINNINDAVQEAKPTLENKAATDEPDSVSTFEPNSVIEPENLSLDDLDHISDDEPDASDTDEPSGEYDEPSLQIPSVPIIDESHDTTLKSSLGGPDLSTLKVTELRELAKSRGIKGYSKMKKNDLSQGTDWEDFLGIVCLPIINSTISFIKENNAGDAAAALMSRLALKTKVLRDEQWQELDASTLVPGDIISIRFGDIVPADACLLEGDPLKMNCHTPFMRKMSITGIQLSLVNPFLSPKEPGTIVFTGSTCKHGEIEAVVIATGIHSFFGKAAHLVDSTEVVGHFQKLCVFFSLSQRMQGLPQSFHQNMNHHCLDLGCLDGLVEGGAVYDGGGGFPSILYTRIIIGQCTTLIFACS

SEQ ID NO: 232 - DNA, 411 bp, Oryza sativa
atgggattctgctttgtcctccacggaatagcttctcatgctcatcgttggggagcatcaggtcagaagcaaatggatctccgttgccaagaacggttaataggcgtagcaaagaagagctcattgagttcttcaaaagcatccagacctccattgccgaggaatcgccaagaacttcgaggaggacgaggaagcaatcatctgacccgttcgaagaggttgagaggaggaagcagtcatacgctaggcatagctgatgtttcggaggaacatgcagatggggagccaaaggcgctggatctgaatgatatgaaggtggctgagctgagagaattggcgagggcgagaaggatgaaaggttactcgaggctgaagaagagtgagctgattgatcgtctgaagggtgtctga

SEQ ID NO: 233 - protein, 136 aa, Oryza sativa
MGFCFVLHGIASHAHRWGASGQKQMDLRCQERLIGVAKKSSLSSSKASRPPLPRNRQELRGGRGSNHLTRSKRLRGGSSHTLGIADVSEEHADGEPKALDLNDMKVAELRELARARRMKGYSRLKKSELIDRLKGV

SEQ ID NO: 234 - DNA, 777 bp, Musa balbisiana
atggattttatgtccaaaaatgggtcattgctttctccaagtactaatactagatatcaggctactgcaacttcaggacaaagagagagagaaatagttgagctgtttcggaaagttcaagcacaattacgagagcgggctgcaatcaaggaagagaagaagattgaagccgcacaacagggtcaaagcaagaagggaactgtcgattcggttctcaaattattaaggaggcattcaggggatcagaagaagacaactagtccaggagaggaattttctgttgaccaagtagaaagaagcaacacatttgaggatgagcagaatataaatccctttggccctagtgatagcaagtcacaggagtctgatgtacgaggccctcttccttctgctaggcctgcctcaaattttggtagaaaatctcctgttcctagaatggagttccaagctgtactttcagcagaggaggatatcaactctgctccttccaagtcacgagggagaaggaagaagactggcgattatgagtgtgtgcaagcagcacctgcggagtctgttgtgttggatggtccagatgagttatcatcagatgatcagttggatcattctggttctgatgaaacagctgaagaaactatagaatcatcttctacggaagcttctcctgatttgggttccttgaaactttcagaattgagggatcttgcaaggtatcgaggggtcaaagggtattccaaactcaagaaaggagaactggctgaattattgagtgcttga

SEQ ID NO: 235 - protein, 258 aa, Musa balbisiana
MDFMSKNGSLLSPSTNTRYQATATSGQREREIVELFRKVQAQLRERAAIKEEKKIEAAQQGQSKKGTVDSVLKLLRRHSGDQKKTTSPGEEFSVDQVERSNTFEDEQNINPFGPSDSKSQESDVRGPLPSARPASNFGRKSPVPRMEFQAVLSAEEDINSAPSKSRGRRKKTGDYECVQAAPAESVVLDGPDELSSDDQLDHSGSDETAEETIESSSTEASPDLGSLKLSELRDLARYRGVKGYSKLKKGELAELLSA

SEQ ID NO: 236 - DNA, 1206 bp, Arabidopsis thaliana
atggcgatgtcgggaactttccatttgacttctgactatgtccctggttacacactttcagacagccgttgcttctttaactctgctgtttcaagaagaacacttgccatattaccttgctcttcctgtctcgatcacaagaatgggcgtctgaaatctgtccccaatagaagttcttttgtgtgccgagcaagttctggcggctataggagaaatcctgatttctcaagacttaataagcatggttaccggggaaacaacaggcaaagcggagggagagaagattttgatatcgaaaactctgatatgttgtcttcaagaaatgggcctttattcaacctgtctagttcccccaaattccaagctacctcatcccctggacctagagagaaagagatcgtggagcttttcagaaaggttcaagctcagctccgagctcgtgctgcagcaaagaaagaagaaaaaaagattgaagaagcttctaaagggcagggaaaagaaagtgaaactgttgactctcttcttaagttactaaggaagcactcgggagagcaaagcaagaggcaagttagcaaatttagcagccagggagaagtacaaggagatactgttgacaaacaagatcgcaccggaaatcttgtcacttcagggaacaaagataataatgcatcatcctttaccagaccaacatcaagcttcagaagaaagtcgccagtaccaagatctcaatcaccgccagcttattctagcgaggcaacttttgatcaatcatcaagttacagtgtaacctggacccagaagaaggatacagtagagttgcatgatgagcctgaacatgagcctgcgtatgagcatgagcatgagcctgaaaatgagtcagaacctgggcctgtgacaactatgcttgaaccagattcagagctgaaaccagagtcatcatcattttatcaagaggaggaggatgatgatgttacttttgatgtgttatcacaggatgatggtattttagatgtgttatcagatgatgatgagtctctcgatgatgctgatgaagatagtgatgaagctgaggaagaagccgtgaaagacttgagtgaattgaagctggtcgaacttagaggcatagcaaagtcacggggactaaaagggttgtcaaagatgaagaaagccgaattagtggagttgcttggtagtgattccagctga

SEQ ID NO: 237 - protein, 401 aa, Arabidopsis thaliana
MAMSGTFHLTSDYVPGYTLSDSRCFFNSAVSRRTLAILPCSSCLDHKNGRLKSVPNRSSFVCRASSGGYRRNPDFSRLNKHGYRGNNRQSGGREDFDIENSDMLSSRNGPLFNLSSSPKFQATSSPGPREKEIVELFRKVQAQLRARAAAKKEEKKIEEASKGQGKESETVDSLLKLLRKHSGEQSKRQVSKFSSQGEVQGDTVDKQDRTGNLVTSGNKDNNASSFTRPTSSFRRKSPVPRSQSPPAYSSEATFDQSSSYSVTWTQKKDTVELHDEPEHEPAYEHEHEPENESEPGPVTTMLEPDSELKPESSSFYQEEEDDDVTFDVLSQDDGILDVLSDDDESLDDADEDSDEAEEEAVKDLSELKLVELRGIAKSRGLKGLSKMKKAELVELLGSDSS

SEQ ID NO: 238 - DNA, 756 bp, Arabidopsis thaliana
atggacttggctcttcattgtcattgtgcttacccgttgatcaaactaggattcatgagagctaaatcagccaatcatcttcatgttcgagatactcattcactgccgtttgcgttgcgctttgagcagagtctttcgagaacaacgattaatggagatagaagtatttggtttcaagagaaaggtggttcttcttatacttcaatgggaagatccaagaaaggatgtgtttgttgcaagaaaccgtctgatagacgaacgtcaaacccaagtaaatcgaaccaagaggagatcatttcgctcttgaaacggattcaatcttcgatctctaaaggagagtctcgaggagtcgaggaagagaagaacagcgatgagtcttctaaggaaaagccgctgaccaaagctattcttgacgttcttgagaaatcaagaaaaaaaactgagggtaatcaactatgctttggagatactagtgtgaaggagaagccaccaaagagacaagtagagcttcctcgaccaccgtctagttttgtcaagagaactcctttatcttcttctgcctcaggtccaagaggtaagctcccagtatcaaacagcgataaagctttaggaaaattgacaaagaaggaagagaaagcttcactgatagaaactatgaaacttgcagagctcaaagaagttgcaaagaacagaggaatcaaaggatactcaaagttgaggaagagtgaactattggagctgataagatcgtcctga

SEQ ID NO: 239 - protein, 251 aa, Arabidopsis thaliana
MDLALHCHCAYPLIKLGFMRAKSANHLHVRDTHSLPFALRFEQSLSRTTINGDRSIWFQEKGGSSYTSMGRSKKGCVCCKKPSDRRTSNPSKSNQEEIISLLKRIQSSISKGESRGVEEEKNSDESSKEKPLTKAILDVLEKSRKKTEGNQLCFGDTSVKEKPPKRQVELPRPPSSFVKRTPLSSSASGPRGKLPVSNSDKALGKLTKKEEKASLIETMKLAELKEVAKNRGIKGYSKLRKSELLELIRSS

SEQ ID NO: 240 - protein, 35 aa, Artificial sequence
  motif 1: SAP-consensus
  UNSURE (1)..(1): Xaa can be any naturally occurring amino acid
  UNSURE (8)..(8): Xaa can be any naturally occurring amino acid
  UNSURE (28)..(28): Xaa can be any naturally occurring amino acid
XLSSLKVXELRELAKSRGIKGYSKMKKXELVELLS

SEQ ID NO: 241 - protein, 61 aa, Artificial sequence
  motif 2: consensus
  UNSURE (3)..(3): Xaa can be any naturally occurring amino acid
  UNSURE (14)..(15): Xaa can be any naturally occurring amino acid
  UNSURE (18)..(18): Xaa can be any naturally occurring amino acid
  UNSURE (21)..(22): Xaa can be any naturally occurring amino acid
  UNSURE (24)..(24): Xaa can be any naturally occurring amino acid
  UNSURE (26)..(26): Xaa can be any naturally occurring amino acid
  UNSURE (28)..(30): Xaa can be any naturally occurring amino acid
  UNSURE (32)..(32): Xaa can be any naturally occurring amino acid
  UNSURE (37)..(39): Xaa can be any naturally occurring amino acid
  UNSURE (41)..(42): Xaa can be any naturally occurring amino acid
  UNSURE (49)..(49): Xaa can be any naturally occurring amino acid
  UNSURE (56)..(56): Xaa can be any naturally occurring amino acid
  UNSURE (59)..(59): Xaa can be any naturally occurring amino acid
EKXEIVELFKKVQXXLRXRAXXKXEXKXXXEXAKAQXXXEXXTVDSLLXLLRKHSXDQXKK

SEQ ID NO: 242 - protein, 13 aa, Artificial sequence
  motif 3: consensus
  UNSURE (3)..(3): Xaa can be any naturally occurring amino acid
  UNSURE (5)..(5): Xaa can be any naturally occurring amino acid
  UNSURE (7)..(7): Xaa can be any naturally occurring amino acid
RPXSXFXRRSPVP

SEQ ID NO: 243 - protein, 35 aa, Artificial sequence
  motif 1 of SEQ ID NO: 02
DLSTLKVTELRELAKSRGIKGYSKMKKNDLVELLS

SEQ ID NO: 244 - protein, 56 aa, Artificial sequence
  motif 2 of SEQ ID NO: 02
EKEIVELFKRVQAQLRARGKGKEEKKPEQAKAQGERGSVDSLLNLLRKHSVDQRRK

SEQ ID NO: 245 - protein, 13 aa, Artificial sequence
  motif 3 of SEQ ID NO: 02
RPASNFRRRSPVP

SEQ ID NO: 246 - DNA, 1264 bp, Oryza sativa
tcgacgctactcaagtggtgggaggccaccgcatgttccaacgaagcgccaaagaaagccttgcagactctaatgctattagtcgcctaggatatttggaatgaaaggaaccgcagagtttttcagcaccaagagcttccggtggctagtctgatagccaaaattaaggaggatgccaaaacatgggtcttggcgggcgcgaaacaccttgataggtggcttaccttttaacatgttcgggccaaaggccttgagacggtaaagttttctatttgcgcttgcgcatgtacaattttattcctctattcaatgaaattggtggctcactggttcattaaaaaaaaaagaatctagcctgttcgggaagaagaggattttgttcgtgagagagagagagagagagagagagagagagagagagaaggaggaggaggattttcaggcttcgcattgcccaacctctgcttctgttggcccaagaagaatcccaggcgcccatgggctggcagtttaccacggacctacctagcctaccttagctatctaagcgggccgacctagtagccacgtgcctagtgtagattaaagttgccgggccagcaggaagccacgctgcaatggcatcttcccctgtccttcgcgtacgtgaaaacaaacccaggtaagcttagaatcttcttgcccgttggactgggacacccaccaatcccaccatgccccgatattcctccggtctcggttcatgtgatgtcctctcttgtgtgatcacggagcaagcattcttaaacggcaaaagaaaatcaccaacttgctcacgcagtcacgctgcaccgcgcgaagcgacgcccgataggccaagatcgcgagataaaataacaaccaatgatcataaggaaacaagcccgcgatgtgtcgtgtgcagcaatcttggtcatttgcgggatcgagtgcttcacagctaaccaaatattcggccgatgatttaacacattatcagcgtagatgtacgtacgatttgttaattaatctacgagccttgctagggcaggtgttctgccagccaatccagatcgccctcgtatgcacgctcacatgatggcagggcagggttcacatgagctctaacggtcgattaattaatcccggggctcgactataaatacctccctaatcccatgatcaaaaccatctcaagcagcctaatcatctccagctgatcaagagctcttaattagctagctagtgattagctgcgcttgtgatc

SEQ ID NO: 247 - DNA, 54 bp, Artificial sequence; identical to SEQ ID NO: 206
  primer: upstream primer

SEQ ID NO: 248 - DNA, 50 bp, Artificial sequence; identical to SEQ ID NO: 207
  primer: downstream primer

SEQ ID NO: 249 - DNA, 1568 bp, Oryza sativa
cccacgcgtccgcccacgcgtccgggacaccagaaacatagtacacttgagctcactccaaactcaaacactcacaccaatggctctccaagttcaggccgcactcctgccctctgctctctctgtccccaagaagggtaacttgagcgcggtggtgaaggagccggggttccttagcgtgagcagaaggccaagaagccgtcgctggtggtgagggcggtggcgacgcggcgggccggtggcgagccccggcgcgggcacgtcgaaggcggacgggaagaagacgctgcggcagggggtggtggtgatcaccggcgcgtcgtcggggctcgggctcgcggcggcgaaggcgcttggcggagacggggaagtggcacgtggtgatggcgttccgcgactttcctgaaggcggcgacggcggcgaaggcggcggggatggcggcggggagctacaccgtcatgcacctggacctcgcctccctcgacagcgtccgccagttcgtggacaacttccggcgctccggcatgccgctcgacgcgctggtgtgcaacgccgcacatctaccggccgacggcgcggcaaccgacgttcaacgccgacgggtacgagatgagcgtcggggtgaaccacctgggccacttcctcctcgcccgcctcatgctcgacgacctcaagaaatccgactacccgtcgcggcggctcatcatcctcggctccatcaccggcaacaccaacaccttcgccggcaacgtccctcccaaggccgggctaggcgacctccgggggctcgccggcgggctccgcgggcagaacgggtcggcgatgatcgacggcgcggagagcttcgacggcgccaaggcgtacaaggacagcaagatctgtaacatgctgacgatgcaggagttccaccggagattccacgaggagaccgggatcacgttcgcgtcgctgtacccggggtgcatcgcgacgacgggcttgttccgcgagcacatcccgctgttccggctgctgttcccgccgttccagcggttcgtgacgaaggggttcgtgtcggaggcggagtccgggaagcggctggcgcaggtggtgggcgacccgagcctgaccaagtccggcgtgtactggagctggaacaaggactcggcgtcgttcgagaaccagctctcgcaggaggccagcgacccggagaaggccaggaagctctgggacctcagcgagaagctcgtcggcctcgtctgagtttattatttacccattcgtttcaactgttaatttcttcggggtttagggggtttcagctttcagtgagagaggcctgtcaagtgatgtacaattagtaatttttttttacccgacaaatcatgcaataaaaccacaggcttacattatcgatttgtccacctaaattaagtttcaactgttaatttcttcggggtttagggggtttcagctttcagtgagagaggcctgtcaagtgatgtacaattagtaatttttttttacccgacaaatcatgcaataaaaccacaggcttacattatcgatttgtccacctaaattaagt

SEQ ID NO: 250 - DNA, 1227 bp, Chlamydomonas reinhardtii
atgcaggtcaccatgaagagcagcgccgtcagcggccagcgcgtgggcggtgcccgcgtcgccacccgtagcgtgcgccgggcgcagctgcaggttgtggcctctagccgcaagcagatgggccgctggcggtcgatcgacgcgggcgtcgacgcgtccgatgaccagcaagacatcactcgcggccgcgagatggtggacgacctgttccagggcggcttcggtgccggcggcacccacaacgcagtgctgtccagccaggagtacctgagccagagccgcgcctcgttcaacaacattgaggacggcttctacatctcgcccgctttcctggacaagatgaccatccacattgccaagaacttcatggacctgcccaagatcaaggtgcccctcattctgggtatctggggtggcaagggccagggcaagaccttccagtgcgcgctcgcctacaagaagctgggcattgcccccatcgtcatgtccgctggtgagctggagtccggcaacgccggtgagcccgccaagctgatccgcacccgctaccgggaggcctccgacatcatcaagaagggccgcatgtgctcgctgttcatcaacgatctggacgccggtgccggccgcatgggcgacaccacccagtacaccgtgaacaaccagatggtgaacgccaccctgatgaacatcgccgacaacccgaccaacgtccagctgcccggtgtgtacaagaacgaggagatccctcgcgtgcccattgtgtgcacgggcaacgacttctccaccctgtacgcgcccctgatccgcgatggccgcatggagaagtactactggaaccccacccgcgaggaccgcatcggcgtgtgcatgggcatcttccaggaggacaacgttcagcgccgcgaggtggagaacctggtggacaccttccccggccagtccattgacttcttcggcgccctgcgtgcccgcgtgtacgacgacatggtgcgccagtggatcaccgacaccggcgtggacaagatcggccagcagctggtcaacgcccgccagaaggtggccatgcccaaggtgtccatggacctgaacgtgctgatcaagtacggcaagtcgctggtggacgagcaggagaacgtcaagcgcgtgcagctggccgatgcctacctgtcgggcgccgagctggccggccacggcggctcttccctgcccgaggcctacagccgctaa

SEQ ID NO: 251 - protein, 408 aa, Chlamydomonas reinhardtii
MQVTMKSSAVSGQRVGGARVATRSVRRAQLQVVASSRKQMGRWRSIDAGVDASDDQQDITRGREMVDDLFQGGFGAGGTHNAVLSSQEYLSQSRASFNNIEDGFYISPAFLDKMTIHIAKNFMDLPKIKVPLILGIWGGKGQGKTFQCALAYKKLGIAPIVMSAGELESGNAGEPAKLIRTRYREASDIIKKGRMCSLFINDLDAGAGRMGDTTQYTVNNQMVNATLMNIADNPTNVQLPGVYKNEEIPRVPIVCTGNDFSTLYAPLIRDGRMEKYYWNPTREDRIGVCMGIFQEDNVQRREVENLVDTFPGQSIDFFGALRARVYDDMVRQWITDTGVDKIGQQLVNARQKVAMPKVSMDLNVLIKYGKSLVDEQENVKRVQLADAYLSGAELAGHGGSSLPEAYSR

SEQ ID NO: 252 - DNA, 1212 bp, Chloroccum littorale
atgcagatgcagatgaagaacaccgccttcaaggccaccggcgccaagactgctcccaaggccgtcagggtgcccgcctgcaaggcttccaagagccaggccggccgctgggcagccatcgacgctggcaatgatatgtccgacgaccagcaagatatcacgcgcgggcgcgacatggttgactctctgttccagggtcctggcagcggtggtggcacccactctgctgtgctgtcctctgaggactacctgtccactgcctcccgcaacttcaacaacgttgaggacggcttctacatctctcctgctttcctggataagatgaccatccatgttgccaagaacttcatggacctgcccaagatcaaggttcccctcatcctgggtatctggggtggcaagggccagggaaagaccttccagtgcgccctggcttacaagaagctgggcatcagccccatcgtcatgtctgccggtgagctggagtctggtaacgccggtgagcccgccaagctcatccgccagcgctaccgcgaggcttccgacagcgtgaagaagggcaagatgtgctccctcttcatcaacgatctggacgctggtgctggccgcatgggcatgggcacccagtacactgtcaacaaccagatggtcaacgctaccctcatgaacatcgctgataaccctaccaacgtgcagctgcccggcgtgtacaaggaggtgcagattccccgtgttcccattgtctgcacgggtaacgatttctccaccctgtacgcccccctcatccgtgacggccgcatggagaagtactactggaaccccacccgtgaggaccgcatcggcgtctgcatgggaatcttccaggaggacaacgtcaaccgtggcgaggtcgaggtgcttgtggatgccttccccgggcagtcgatcgacttcttcggtgccctccgcgcccgcgtctatgatgacaaggtccgtgaattcgtcaagaacactggtgtcgagaacctgtccaagcgcctgattaacagccgcgagggcaaggttgtcttcgagaagccctctatgaacctggatatcctgatgaagtatggaaagttcctgaccaacgagcaggagaatgtcaagcgcgtgcagctcgcagaggagtatatgatgggggcatccctggcaggcgaccacggaacctccctccccgagaactacacccgctaa

SEQ ID NO: 253 - protein, 403 aa, Chloroccum littorale
MQMQMKNTAFKATGAKTAPKAVRVPACKASKSQAGRWAAIDAGNDMSDDQQDITRGRDMVDSLFQGPGSGGGTHSAVLSSEDYLSTASRNFNNVEDGFYISPAFLDKMTIHVAKNFMDLPKIKVPLILGIWGGKGQGKTFQCALAYKKLGISPIVMSAGELESGNAGEPAKLIRQRYREASDSVKKGKMCSLFINDLDAGAGRMGMGTQYTVNNQMVNATLMNIADNPTNVQLPGVYKEVQIPRVPIVCTGNDFSTLYAPLIRDGRMEKYYWNPTREDRIGVCMGIFQEDNVNRGEVEVLVDAFPGQSIDFFGALRARVYDDKVREFVKNTGVENLSKRLINSREGKVVFEKPSMNLDILMKYGKFLTNEQENVKRVQLAEEYMMGASLAGDHGTSLPENYTR

SEQ ID NO: 254 - DNA, 1224 bp, Ostreococcus tauri
atgcgacaggctaatgcgacgacgaagcgcgccgtcgcgccgaagactttcttgggcgcgcgcgtgtcctccgtctccaacggctccaaggttgagatgagccgctggaagggcatggacatggacatctccgacgaccaacaagacatcgcgcgcggtaagaacatggttgactccaagttccaaggtggtgccggtatcggtggtacccacaacgccgttatgtcttcccaagactacttgtccgcgggcatgaagacgtacgacggtcacgacaacatcaccgccgaaaacttctacatctccaagtcttacatggataaggtcgtcgtgcacatcgcgaagaacttcatgcaactcccgaagatcaaggtcccgctcatcctcggtgtgtggggtggtaagggtcaaggtaagactttccagtccgacttgatcttccgcaagctcggtatcaacccgattgtgatgtccgctggtgagctcgaatccggcaacgccggtgagcccgccaagctcgttcgtcaacgttaccgcgaggcgtccgacatcgtcaagaagggccgtatgtccacgctcttcatcaacgatctcgatgccggtgccggtcgtatgggcggcacgacgcagtacaccgtgaacaaccaaatggtgaacgcgacgctcatgaacatcgccgacaaccctaccaacgtccagttgccgggccaatacgaagtcatcgagatcccgcgtgtgccgatcatcgccaccggtaacgatttctccaccctttacgcgccgctcgttcgtgacggccgtatggacaagttctactggtccccgacctttgaagatcgcgtcggcattgccaacggtatcttcatggctgacggcgtctccccggaagacgtcgaagtccttgtctccaccttcgaaggccagtccattgacttcttcggtgccctccgtgcccgcgtgtacgacgacaaggtccgtgacttcatcctctctgttggctatgatcaactcggcaagcgcctcatcaacccgcgcaagggtgaagaagttgtcttcgaaccgccggccatgaccctcgaagtcctcttggcctacggtaaggagatcgaaaacgagcaagaaaacatcaagcgcatccaattggccgatgcctacttggacggtgctgtgttggcgggctctggcggttcctcgaacactgacaagtctctcaacacgaagtaa

SEQ ID NO: 255 - protein, 407 aa, Ostreococcus tauri
MRQANATTKRAVAPKTFLGARVSSVSNGSKVEMSRWKGMDMDISDDQQDIARGKNMVDSKFQGGAGIGGTHNAVMSSQDYLSAGMKTYDGHDNITAENFYISKSYMDKVVVHIAKNFMQLPKIKVPLILGVWGGKGQGKTFQSDLIFRKLGINPIVMSAGELESGNAGEPAKLVRQRYREASDIVKKGRMSTLFINDLDAGAGRMGGTTQYTVNNQMVNATLMNIADNPTNVQLPGQYEVIEIPRVPIIATGNDFSTLYAPLVRDGRMDKFYWSPTFEDRVGIANGIFMADGVSPEDVEVLVSTFEGQSIDFFGALRARVYDDKVRDFILSVGYDQLGKRLINPRKGEEVVFEPPAMTLEVLLAYGKEIENEQENIKRIQLADAYLDGAVLAGSGGSSNTDKSLNTK

SEQ ID NO: 256 - DNA, 1341 bp, Arabidopsis thaliana
atggccgccgcagtttccaccgtcggtgccatcaacagagctccgttgagcttgaacgggtcaggatcaggagctgtatcagccccagcttcaaccttcttgggaaagaaagttgtaactgtgtcgagattcgcacagagcaacaagaagagcaacggatcattcaaggtgttggctgtgaaagaagacaaacaaaccgatggagacagatggagaggtcttgcctacgacacttctgatgatcaacaagacatcaccagaggcaagggtatggttgactctgtcttccaagctcctatgggaaccggaactcaccacgctgtccttagctcatacgaatacgttagccaaggccttaggcagtacaacttggacaacatgatggatgggttttacattgctcctgctttcatggacaagcttgttgttcacatcaccaagaacttcttgactctgcctaacatcaaggttccacttattttgggtatatggggaggcaaaggtcaaggtaaatccttccagtgtgagcttgtcatggccaagatgggtatcaacccaatcatgatgagtgctggagagcttgagagtggaaacgcaggagaacccgcaaagcttatccgtcagaggtaccgtgaggcagctgacttgatcaagaagggaaagatgtgttgtctcttcatcaacgatcttgacgctggtgcgggtcgtatgggtggtactactcagtacactgtcaacaaccagatggttaacgcaacactcatgaacattgctgataacccaaccaacgtccagctcccaggaatgtacaacaaggaagagaacgcacgtgtccccatcatttgcactggtaacgatttctccaccctatacgctcctctcatccgtgatggacgtatggagaagttctactgggccccgacccgtgaagaccgtatcggtgtctgcaagggtatcttcagaactgacaagatcaaggacgaagacattgtcacacttgttgatcagttccctggtcaatctatcgatttcttcggtgctttgagggcgagagtgtacgatgatgaagtgaggaagttcgttgagagccttggagttgagaagatcggaaagaggctggttaactcaagggaaggacctcccgtgttcgagcaacccgagatgacttatgagaagcttatggaatacggaaacatgcttgtgatggaacaagagaatgtcaagagagtccaacttgccgagacctacctcagccaggctgctttgggagacgcaaacgctgacgccatcggccgcggaactttctacggtaaaacagaggaaaaggagcccagcaagtaa

SEQ ID NO: 257 - protein, 446 aa, Arabidopsis thaliana
MAAAVSTVGAINRAPLSLNGSGSGAVSAPASTFLGKKVVTVSRFAQSNKKSNGSFKVLAVKEDKQTDGDRWRGLAYDTSDDQQDITRGKGMVDSVFQAPMGTGTHHAVLSSYEYVSQGLRQYNLDNMMDGFYIAPAFMDKLVVHITKNFLTLPNIKVPLILGIWGGKGQGKSFQCELVMAKMGINPIMMSAGELESGNAGEPAKLIRQRYREAADLIKKGKMCCLFINDLDAGAGRMGGTTQYTVNNQMVNATLMNIADNPTNVQLPGMYNKEENARVPIICTGNDFSTLYAPLIRDGRMEKFYWAPTREDRIGVCKGIFRTDKIKDEDIVTLVDQFPGQSIDFFGALRARVYDDEVRKFVESLGVEKIGKRLVNSREGPPVFEQPEMTYEKLMEYGNMLVMEQENVKRVQLAETYLSQAALGDANADAIGRGTFYGKTEEKEPSK

SEQ ID NO: 258 - DNA, 1422 bp, Arabidopsis thaliana
atggccgccgcagtttccaccgtcggtgccatcaacagagctccgttgagcttgaacgggtcaggatcaggagctgtatcagccccagcttcaaccttcttgggaaagaaagttgtaactgtgtcgagattcgcacagagcaacaagaagagcaacggatcattcaaggtgttggctgtgaaagaagacaaacaaaccgatggagacagatggagaggtcttgcctacgacacttctgatgatcaacaagacatcaccagaggcaagggtatggttgactctgtcttccaagctcctatgggaaccggaactcaccacgctgtccttagctcatacgaatacgttagccaaggccttaggcagtacaacttggacaacatgatggatgggttttacattgctcctgctttcatggacaagcttgttgttcacatcaccaagaacttcttgactctgcctaacatcaaggttccacttattttgggctctcggggaggcaaaggtcaaggtaaatccttccagtgtgagcttgtcatggccaagatgggtatcaacccaatcatgatgagtgctggagagcttgagagtggaaacgcaggagaagtccgcaagcttatccgtcagaggtaccgtgaggcagctgacttgatcaagaagggaaagatgtgttgtctcttcatcaacgatcttgacgctggtgcgggtcgtatgggtggtactactcagtacactgtcaacaaccagatggttaacgcaacactcatgaacattgctgataacccaaccaacgtccagctcccaggaatgtacaacaaggaagagaacgcacgtgtccccatcatttgcactggtaacgatttctccaccttatacggtcctctcatccttgatggacgtatggagaagttcttgactggcccgacccgtgaagaccgtatcggtgtctggggtatcttcagaactgacaagatcaaggacgaagacattgtcacacttgttgatcagttccctggtcaatctatcgatttcttcggtgctttgagggcgagagtgtacgatgatgaagtgaggaagttcgttgagagccttggagttgagaagatcggaaagaggctcgttaactcaagggaaggacctcccgtgttcgagcaacccgagatgacttatgagaagcttatggaatacggaaacatgcttgtgatggaacaagagaatgtcaagagagtccaacttgccgagacctacctcagccaggctgctttgggagacgcaaacgctgacgccatcggccgcggaactttctacggaaaaggagcccacgaagtaaacctgccagttcctgaagggtgtactgatcctgtggctgaaaactttgatccaacggctagaagtgacgatggaacctgtgtctacaacttttga

SEQ ID NO: 259 - protein, 473 aa, Arabidopsis thaliana
MAAAVSTVGAINRAPLSLNGSGSGAVSAPASTFLGKKVVTVSRFAQSNKKSNGSFKVLAVKEDKQTDGDRWRGLAYDTSDDQQDITRGKGMVDSVFQAPMGTGTHHAVLSSYEYVSQGLRQYNLDNMMDGFYIAPAFMDKLVVHITKNFLTLPNIKVPLILGSRGGKGQGKSFQCELVMAKMGINPIMMSAGELESGNAGEVRKLIRQRYREAADLIKKGKMCCLFINDLDAGAGRMGGTTQYTVNNQMVNATLMNIADNPTNVQLPGMYNKEENARVPIICTGNDFSTLYGPLILDGRMEKFLTGPTREDRIGVWGIFRTDKIKDEDIVTLVDQFPGQSIDFFGALRARVYDDEVRKFVESLGVEKIGKRLVNSREGPPVFEQPEMTYEKLMEYGNMLVMEQENVKRVQLAETYLSQAALGDANADAIGRGTFYGKGAHEVNLPVPEGCTDPVAENFDPTARSDDGTCVYNF

SEQ ID NO: 260 - DNA, 1314 bp, Acer rubrum
atggctgctgctgtctcgactgttggtgctatcaacagtgcaccgctgagcttgaatggctctggtgctgctggatccactgtcccaacctcagctttcttcggcacaagcttgaagaaggtggcctcaagattccccaacccgaaggtccactccgggagcttcaaagttgtagcagaaatagacgagaataagcagaccgaaaaggataaatggagaggccttgcttatgacacatccgatgaccaacaagacatcaccagaggaaagggtttggtggactctctcttccaggcccccagcgggaccggaactcactacgctgtcatgagctcttacgactacatcagcactggtcttcgaacttacttggaaaacagcatggatggattttacattgctcccgctttcatggacaagcttgttgttcacatcaccaagaacttcatgtctctgcctaacatcaagattcctttgatcttgggtatttggggaggcaaaggtcagggaaaatcattccaatgtgagcttgttttcgcaaagatgggtattacccctattatgatgagtgccggagaactggaaagtggaaacgcgggagaacccgcgaagcttatcaggcaaagatatcgtgaggcagctgatataatcaagaagggaaagatgtgctgcctcttcatcaatgatcttgatgccggagctggacgtatgggcggaaccactcaatacacagttaacaaccagatggttaatgctactctcatgaacattgctgataatccaaccagtgtccagctccctggaatgtacaacaaggaggaaaacccccgtgtcccaatcattgtcactggtaacgacttttcaaccttgtatgctcctcttatccgtgatggtcgtatggagaaattctactgggctcctaccagggaagaccgcattggtgtctgcaaaggaattttcaggagtgacaatgttgctgatggtgaactaatcaagcttgtcgacaccttccctggccaatcaatcgactttttcggtgccctgagggccagagtgtacgacgatgaagtgaggaagtggatctctggcataggcgttgatagcattgggaagaaccttgtgaactcaaagaacggacccccaaccttcgagcaacccaaaatgacaatcgacaagctccttgagtacggaaacatgcttgtccaggagcaagagaacgtcaagagagtccaattagccgacaagtacctgagcgaggctgcccttggcgatgctaacgatgatgctatcaagcgtggatctttctacggttag

SEQ ID NO: 261 - protein, 437 aa, Acer rubrum
MAAAVSTVGAINSAPLSLNGSGAAGSTVPTSAFFGTSLKKVASRFPNPKVHSGSFKVVAEIDENKQTEKDKWRGLAYDTSDDQQDITRGKGLVDSLFQAPSGTGTHYAVMSSYDYISTGLRTYLENSMDGFYIAPAFMDKLVVHITKNFMSLPNIKIPLILGIWGGKGQGKSFQCELVFAKMGITPIMMSAGELESGNAGEPAKLIRQRYREAADIIKKGKMCCLFINDLDAGAGRMGGTTQYTVNNQMVNATLMNIADNPTSVQLPGMYNKEENPRVPIIVTGNDFSTLYAPLIRDGRMEKFYWAPTREDRIGVCKGIFRSDNVADGELIKLVDTFPGQSIDFFGALRARVYDDEVRKWISGIGVDSIGKNLVNSKNGPPTFEQPKMTIDKLLEYGNMLVQEQENVKRVQLADKYLSEAALGDANDDAIKRGSFYG

SEQ ID NO: 262 - DNA, 1425 bp, Acer rubrum
atggctgctgctgtctcgactgttggtgctatcaacagtgcaccgctgagcttgaatggctctggtgctgctggatccactgtcccaacctcagctttcttcggcacaagcttgaagaaggtggcctcaagattccccaacccgaaggtccactccgggagcttcaaagttgtagcagaaatagacgagaataagcagaccgaaaaggataaatggagaggccttgcttatgacacatccgatgaccaacaagacatcaccagaggaaagggtttggtggactctctcttccaggcccccagcgggaccggaactcactacgctgtcatgagctcttacgactacatcagcactggtcttcgaacttacttggaaaacagcatggatggattttacattgctcccgctttcatggacaagcttgttgttcacatcaccaagaacttcatgtctctgcctaacatcaagattcctttgatcttgggtatttggggaggcaaaggtcagggaaaatcattccaatgtgagcttgttttcgcaaagatgggtattacccctattatgatgagtgccggagaactggaaagtggaaacgcgggagaacccgcgaagcttatcaggcaaagatatcgtgaggcagctgatataatcaagaagggaaagatgtgctgcctcttcatcaatgatcttgatgccggagctggacgtatgggcggaaccactcaatacacagttaacaaccagatggttaatgctactctcatgaacattgctgataatccaaccagtgtccagctccctggaatgtacaacaaggaggaaaacccccgtgtcccaatcattgtcactggtaacgacttttcaaccttgtatgctcctcttatccgtgatggtcgtatggagaaattctactgggctcctaccagggaagaccgcattggtgtctgcaaaggaattttcaggagtgacaatgttgctgatggtgaactaatcaagcttgtcgacaccttccctggccaatcaatcgactttttcggtgccctgagggccagagtgtacgacgatgaagtgaggaagtggatctctggcataggcgttgatagcattgggaagaaccttgtgaactcaaagaacggacccccaaccttcgagcaacccaaaatgacaatcgacaagctccttgagtacggaaacatgcttgtccaggagcaagagaacgtcaagagagtccaattagccgacaagtacctgagcgaggctgcccttggcgatgctaacgatgatgctatcaagcgtggatctttctacggcaaagcagctcagcaagtgaatgttcctgtccctgaaggttgtactgatcgaaatgcagcaaactatgatccaacggcaaggagtgatgacggaagctgccagtatacactctag

SEQ ID NO: 263 - protein, 474 aa, Acer rubrum
MAAAVSTVGAINSAPLSLNGSGAAGSTVPTSAFFGTSLKKVASRFPNPKVHSGSFKVVAEIDENKQTEKDKWRGLAYDTSDDQQDITRGKGLVDSLFQAPSGTGTHYAVMSSYDYISTGLRTYLENSMDGFYIAPAFMDKLVVHITKNFMSLPNIKIPLILGIWGGKGQGKSFQCELVFAKMGITPIMMSAGELESGNAGEPAKLIRQRYREAADIIKKGKMCCLFINDLDAGAGRMGGTTQYTVNNQMVNATLMNIADNPTSVQLPGMYNKEENPRVPIIVTGNDFSTLYAPLIRDGRMEKFYWAPTREDRIGVCKGIFRSDNVADGELIKLVDTFPGQSIDFFGALRARVYDDEVRKWISGIGVDSIGKNLVNSKNGPPTFEQPKMTIDKLLEYGNMLVQEQENVKRVQLADKYLSEAALGDANDDAIKRGSFYGKAAQQVNVPVPEGCTDRNAANYDPTARSDDGSCQYTL

SEQ ID NO: 264 - DNA, 1317 bp, Chenopodium quinoa
atggctactgctgtctcaaccgtcggagctgctaccaaggcacctttgaacttgaatggctcgagcgctggggcatcagtcccaacctcagctttcttagggagcagcttaaagaagcatacaagtgtgagattcccaagcagctctagggcgagctcaatgaccgtcaaggcggctgactacgaggagagcaagcagtccaacacggacagatgggctcatttggctacagacatctctgatgatcaactcgacatccgtaggggtaagggtatggttgactccctcttccaagctccgatggactccggcacccacgttccagttcagagttcactcgaatacgagagtcaaggtcttaggaagtacaacatcgacaacatgttgggtaacttctacattgccccttctttcatggacaagattgttgttcacatcaccaagaactacttgaacttgcctaacatcaaggttcccctgatcttgggtatttggggaggcaaaggtcaaggtaaatccttccaatgtgagcttgtgttcgccaagatgggaatcaaccccatcatgatgagtgcgggagaattggaaagtggaaacgcaggagagccagcaaagttgatcaggcaaaggtaccgtgaggcagcagacataattgccaagggaaagatgtgtgctctgttcatcaacgatctcgacgcgggtgctggacgtatgggaggcaccacacaatacaccgtgaacaaccagatggttaacgccaccctcatgaacattgctgacaaccccaccaatgtccaactccctggtatgtacaacaagcaagagaacgcccgtgttcccattatcgtcactggtaacgacttctccaccttgtacgctccccttatccgtgatggtcgtatggagaagttctactgggctcccacccgtgaggaccgtatcggtgttgccaccggtatcttcaggaccgacaatgttcctgaggaccacgttgtcaagctcgtcgacaccttccctggccaatctattgatttcttcggtgccttgagggctcgtgtatacgatgatgaagtaaggaagtgggtttctgaagtaggaattgacgccgtaggaaagaagctcgtaaactcaagggacggaccaccagtgttcgaacaaccaaaaatgaccttggaaaagttgcttgaatacggaaacatgcttgtgcaagagcaagagaatgtcaagagagtccaacttgctgacaagtacttgagcgaggctgctcttggagatgctaacaaagatgctattgcatccggagctttcttcggttaa

SEQ ID NO: 265 - protein, 438 aa, Chenopodium quinoa
MATAVSTVGAATKAPLNLNGSSAGASVPTSAFLGSSLKKHTSVRFPSSSRASSMTVKAADYEESKQSNTDRWAHLATDISDDQLDIRRGKGMVDSLFQAPMDSGTHVPVQSSLEYESQGLRKYNIDNMLGNFYIAPSFMDKIVVHITKNYLNLPNIKVPLILGIWGGKGQGKSFQCELVFAKMGINPIMMSAGELESGNAGEPAKLIRQRYREAADIIAKGKMCALFINDLDAGAGRMGGTTQYTVNNQMVNATLMNIADNPTNVQLPGMYNKQENARVPIIVTGNDFSTLYAPLIRDGRMEKFYWAPTREDRIGVATGIFRTDNVPEDHVVKLVDTFPGQSIDFFGALRARVYDDEVRKWVSEVGIDAVGKKLVNSRDGPPVFEQPKMTLEKLLEYGNMLVQEQENVKRVQLADKYLSEAALGDANKDAIASGAFFG

SEQ ID NO: 266 - DNA, 1287 bp, Deschampsia antartica
  misc_feature (48)..(48): n is a, c, g, or t
  misc_feature (282)..(282): n is a, c, g, or t
  misc_feature (306)..(306): n is a, c, g, or t
  misc_feature (981)..(981): n is a, c, g, or t
atggctgctgccttctcctccaccgtcggagctccggcttccacgccnaccagcttcctcggcaacaagctcaagaagcaggtgacctcggcagtgaactaccatggcaagagcttcaaggccaacaggttcaccgtcatggccaaggatatcgacgagggcaagcagaccgacggggacaagtggaagggcctcgcctacgatatctccgacgaccagcaggacatcaccaggggtaagggtatcgtcgactccttgttccaggcgcccatgggcgatggnacccacgaggccgtcctcagctcntacgagtacgtcagccagggcctcaagaagtacgacttcgacaacaccatgggaggcttctacatcgccccggctttcatggacaagctcgttgtccacctctccaagaacttcatgaccctgcccaacatcaagatcccactcatcttgggtatctggggaggaaagggtcaggggaaatccttccagtgtgagcttgtcttcgccaagatgggcatcaacccaatcatgatgagtgccggagagctggagagcggcaacgccggagagccagccaagctcatcaggcagcggtaccgcgaggccgcagacatgatcaagaagggcaagatgtgctgcctcttcatcaacgacctcgacgccggcgcgggtcggatgggcgggaccacccagtacaccgtgaacaaccagatggtgaacgccaccctgatgaacatcgccgacgcgcccaccaacgtgcagctcccggggatgtacaacaaggaggagaacccccgtgtccccatcatcgtcaccggcaacgacttctcgacgctgtacgcgcccctcatccgtgacggtcgtatggagaagttctactgggcgcccacccgcgaggaccgtatcggcgtctgcaagggtatcttccagaccgacaacgtcagcgacgagtctgtcgtcaagatcgtcgacacnttcccaggacagtccatcgacttcttcggtgctctgcgtgctcgggtgtacgacgttgaggtgcgcaagtgggtgtcgtccaccggaattgagaacatcggcaagaggctggtgaactcgcgggacggacccgtcaccttcgagcagcccaagatgacggtggagaagttgctggagtacggccacatgcttgtccaggagcaggacaatgtcaagcgtgtgcagcttgcggacacttacatgagccaggcagctctgggtgatgcgaacaaggatgccatgaagactggttccttctacggttag

SEQ ID NO: 267 - protein, 428 aa, Deschampsia antartica
MAAAFSSTVGAPASTPTSFLGNKLKKQVTSAVNYHGKSFKANRFTVMAKDIDEGKQTDGDKWKGLAYDISDDQQDITRGKGIVDSLFQAPMGDGTHEAVLSSYEYVSQGLKKYDFDNTMGGFYIAPAFMDKLVVHLSKNFMTLPNIKIPLILGIWGGKGQGKSFQCELVFAKMGINPIMMSAGELESGNAGEPAKLIRQRYREAADMIKKGKMCCLFINDLDAGAGRMGGTTQYTVNNQMVNATLMNIADAPTNVQLPGMYNKEENPRVPIIVTGNDFSTLYAPLIRDGRMEKFYWAPTREDRIGVCKGIFQTDNVSDESVVKIVDTFPGQSIDFFGALRARVYDVEVRKWVSSTGIENIGKRLVNSRDGPVTFEQPKMTVEKLLEYGHMLVQEQDNVKRVQLADTYMSQAALGDANKDAMKTGSFYG

SEQ ID NO: 268 - DNA, 1398 bp, Deschampsia antartica
  misc_feature (816)..(816): n is a, c, g, or t
atggctgctgccttctcctccaccgtcggagctccggcttccacgccgaccagcttcctcggcaacaagctcaagaagcaggtgacctcggcagtgaactaccatggcaagagcttcaaggccaacaggttcaccgtcatggccaaggatatcgacgagggcaagcagaccgacggggacaagtggaagggcctcgcctacgatatctccgacgaccagcaggacatcaccaggggtaagggtatcgtcgactccctgttccaggcgcccatgggcgatggcacccacgaggccgtcctcagctcctacgagtacgtcagccagggcctcaagaagtacgacttcgacaacaccatgggaggcttctacatcgccccggctttcatggacaagctcgttgtccacctctccaagaacttcatgaccctgcccaacatcaagatcccactcatcttgggtatctggggaggaaagggtcaggggaaatccttccagtgtgagcttgtcttcgccaagatgggcatcaacccaatcatgatgagtgccggagagctggagagcggcaacgccggagagccagccaagctcatcaggcagcggtaccgcgaggccgcagacatgatcaagaagggcaagatgtgctgcctcttcatcaacgacctcgacgccggcgcgggtcggatgggcgggaccacccagtacaccgtgaacaaccagatggtgaacgccaccctgatgaacatcgccgacgcgcccaccaacgtgcagcttccggggatgtacaacaaggaggagaacccccgtgttcccattatngtcaccggcaacgacttttcgacgctgtacgccccccttattcctgacggtcgtatggagaagttttactgggcgcccacccgcgaggaccgtatcggcgtctgcaagggtatcttccagaccgacaacgtcagcgacgagtctgtcgtcaagatcgtcgacaccttcccaggacagtccatcgacttcttcggtgctctgcgtgctcgggtgtacgacgacgaggtgcgcaagtgggtgtcgtccaccggaattgagaacatcggcaagaggctggtgaactcgcgggacggacccgtcaccttcgagcagcccaagatgacggtggagaagttgctggagtacggccacatgcttgtccaggagcaggacaatgtcaagcgtgtgcagcttgcggacacttacatgagccaggcagctctgggtgatgcgaacaaggatgccatgaagactggttccttctacggtaaaggagcacaacaaggcactttgcctgtgccggaaggttgtaccgaccgggatgccaagaacttcgacccaaccgcgaggagcgacgacggcagctgcctttacaccttttaa

SEQ ID NO: 269 - protein, 465 aa, Deschampsia antartica
  misc_feature (272)..(272): Xaa can be any naturally occurring amino acid
MAAAFSSTVGAPASTPTSFLGNKLKKQVTSAVNYHGKSFKANRFTVMAKDIDEGKQTDGDKWKGLAYDISDDQQDITRGKGIVDSLFQAPMGDGTHEAVLSSYEYVSQGLKKYDFDNTMGGFYIAPAFMDKLVVHLSKNFMTLPNIKIPLILGIWGGKGQGKSFQCELVFAKMGINPIMMSAGELESGNAGEPAKLIRQRYREAADMIKKGKMCCLFINDLDAGAGRMGGTTQYTVNNQMVNATLMNIADAPTNVQLPGMYNKEENPRVPIXVTGNDFSTLYAPLIPDGRMEKFYWAPTREDRIGVCKGIFQTDNVSDESVVKIVDTFPGQSIDFFGALRARVYDDEVRKWVSSTGIENIGKRLVNSRDGPVTFEQPKMTVEKLLEYGHMLVQEQDNVKRVQLADTYMSQAALGDANKDAMKTGSFYGKGAQQGTLPVPEGCTDRDAKNFDPTARSDDGSCLYTF

SEQ ID NO: 270 - DNA, 1440 bp, Glycine max
atggctgcctccgtctccactgtcggagctgtcaacagagctcttttgaacctgaatggttctggagctggagcttcagctcccagttcagccttctttgggaccagcttgaagaaggttattgcctcaagggtccccaacagcaaggtttccggtggaagcttcaagattgttgctgtagaagagaagaaagagattgaagagacccagcagaccgacaaggacagatggaagggtcttgcctatgatatctcagacgaccaacaagacatcacaagaggaaagggtttggttgactcccttttccaagctccacaggatgctggaactcactatgcagtcatgagctcctacgagtaccttagcactggacttcgccagtacttggacaacaacatggatggattttacattgctccagcttttatggacaagcttgttgttcacatcagcaagaacttcatgaccctgcccaacatcaaggttcctctcattcttggtatctggggaggcaaaggtcaaggaaaatctttccaatgcgagcttgtctttgccaagatgggaatcaaccccatcatgatgagtgctggagagttggaaagtggaaatgcaggagagccagcaaaactgatcagacagagataccgtgaagccgcagacatgatcaagaagggaaagatgtgtgctctcttcatcaacgatcttgatgcaggagctggtcgtcttggtggaactacacaatacactgtcaacaaccagatggtgaatgccaccctcatgaacattgctgataaccccaccaatgtgcagcttcctggtatgtacaacaaggaagagaacccccgtgtgcccatcatcgtcaccggtaacgatttctcaacactgtatgctcctctcatccgtgatgggcgtatggagaagttctactgggcacctacaagggacgatcgtgttggcgtctgcaatggaattttccgcactgacaatgttcctaaggatgacattgtcaagcttgttgacaccttccccggccaatctattgatttctttggtgcactcagggctagagtatatgatgatgaggtgaggaagtggatttctgttgttggtgttgacttcattgggaagaagcttgtgaactccaaggaaggacctccaacctttgaccaaccgaagatgactttgagcaagctcttggagtatggtaacatgcttgtccaagaacaagagaatgtgaagagagtacaactggcagacaagtacttgaaagaggctgctcttggtgatgctaatcaagatgccatcaaaagaggaactttctatggcaaagcagcccagcaagtaaaaattcccgttcctgaaggttgtactgatccaaatgcctcaaacttcgacccaactgcaagaagtgatgatggaacctgcttatacacaccctga

SEQ ID NO: 271 - protein, 479 aa, Glycine max
MAASVSTVGAVNRALLNLNGSGAGASAPSSAFFGTSLKKVIASRVPNSKVSGGSFKIVAVEEKKEIEETQQTDKDRWKGLAYDISDDQQDITRGKGLVDSLFQAPQDAGTHYAVMSSYEYLSTGLRQYLDNNMDGFYIAPAFMDKLVVHISKNFMTLPNIKVPLILGIWGGKGQGKSFQCELVFAKMGINPIMMSAGELESGNAGEPAKLIRQRYREAADMIKKGKMCALFINDLDAGAGRLGGTTQYTVNNQMVNATLMNIADNPTNVQLPGMYNKEENPRVPIIVTGNDFSTLYAPLIRDGRMEKFYWAPTRDDRVGVCNGIFRTDNVPKDDIVKLVDTFPGQSIDFFGALRARVYDDEVRKWISVVGVDFIGKKLVNSKEGPPTFDQPKMTLSKLLEYGNMLVQEQENVKRVQLADKYLKEAALGDANQDAIKRGTFYGKAAQQVKIPVPEGCTDPNASNFDPTARSDDGTCLYTP

SEQ ID NO: 272 - DNA, 1317 bp, Gossypium hirsutum
atggcggctgccgtctccaccatcggtgctgtcaaccgagcaccgttgagtttgaatggatcaggtgccggagcttctgctccaagctcagctttcatggggaacagcttgaagaaagtgagcgctaggttcaacaacaacggcaaggctccagtgggaagtttcaagattgtggctgccaaagaaatcgacgaagacacacagaccgaccaggaccgatggaagggtcttgcttatgatatctccgatgaccaacaagacattaccagagggaaaggtatggtcgactcattgttccaagctcccatgaacgatggtactcactatgctgtcatgagctcctatgagtacattagccaaggccttcgcacatacgacttggacaacaacatggatggattctacattgccccagctttcatggacaagcttgttgttcacatcaccaagaactacatgacccttcctaacattaaggttcctcttatcttgggtatttggggaggcaaaggtcaaggaaaatctttccaatgtgagcttgtctttgccaagatgggaatcaaccccattatgatgagtgccggagaattggaaagtgggaacgccggagaaccagccaagttgatcaggcaaaggtaccgtgaggccgccgacattatcaagaaagggaaaatgtgttgcctctttatcaacgatctcgacgctggagccggtcgtatgggaggaaccacacaatacacagtgaacaaccaaatggtgaacgccacactcatgaacatcgctgataaccccaccaacgttcagctccccggtatgtacaacaaggaagagaaccctcgtgttccgatcattgtcaccggtaacgatttctcgacgctgtacgcgccgctcatccgtgacggtcgtatggagaagttttactgggcacccaccagggaagataggatcggtgtttgcacaggtattttcaggaccgacaatgttcccgttgatgacattgttaagcttgttgacaccttcccgggccaatccattgactttttcggtgctctgagggccagagtttacgatgacgaagtgaggaaatggatcggagaggtaggagtcaatagtgtcgggaaaaagctcgtgaactcgagggaagggccaccatctttcgagcaacctacgatgaccattgagaagctgttggagtatggaaacatgcttgttgctgaacaagagaacgtgaagagggttcaattggctgacaaatatttgagtgaagctgcccttggaaatgctaatgacgatgctatcaagagaggagctttctaa

SEQ ID NO: 273 - protein, 438 aa, Gossypium hirsutum
MAAAVSTIGAVNRAPLSLNGSGAGASAPSSAFMGNSLKKVSARFNNNGKAPVGSFKIVAAKEIDEDTQTDQDRWKGLAYDISDDQQDITRGKGMVDSLFQAPMNDGTHYAVMSSYEYISQGLRTYDLDNNMDGFYIAPAFMDKLVVHITKNYMTLPNIKVPLILGIWGGKGQGKSFQCELVFAKMGINPIMMSAGELESGNAGEPAKLIRQRYREAADIIKKGKMCCLFINDLDAGAGRMGGTTQYTVNNQMVNATLMNIADNPTNVQLPGMYNKEENPRVPIIVTGNDFSTLYAPLIRDGRMEKFYWAPTREDRIGVCTGIFRTDNVPVDDIVKLVDTFPGQSIDFFGALRARVYDDEVRKWIGEVGVNSVGKKLVNSREGPPSFEQPTMTIEKLLEYGNMLVAEQENVKRVQLADKYLSEAALGNANDDAIKRGAF

SEQ ID NO: 274 - DNA, 1284 bp, Hordeum vulgare
atggctgctgccttctcctccaccgtcggggctccggcttctacgccgaccaacttcctcgggaagaagctcaagaagcaggtgacctcggccgtgaactaccatggcaagagctccaaggccaacaggttcacagtcatggcagcggagaacatcgacgagaagaggaacaccgacaagtggaagggtcttgctaccgatatctccgacgaccagcaggacatcaccagagggaagggcatcgtggactcgctcttccaggcgcccacgggcgacggcacccacgaggccgtcctcagctcctacgagtacgtcagccagggcctgcggaagtacgacttcgacaacaccatgggaggcttctacatcgctcctgctttcatggacaagcttgttgtccatctctccaaaaacttcatgaccctgcccaacatcaagatcccactcatcttgggtatctggggaggcaagggtcaaggaaaatcattccagtgtgagcttgtgttcgccaagatgggcatcaaccccatcatgatgagtgccggagagctggagagtgggaacgctggagagccagccaagctcatcaggcagcggtaccgtgaggctgcagacatgatcaagaagggtaagatgtgctgcctcttcatcaacgatcttgacgctggtgcgggtaggatgggcggaaccacgcagtacaccgtcaacaaccagatggtgaacgccaccctgatgaacatcgccgatgcccccaccaacgtgcagctccctggcatgtacaacaagagggagaacccccgtgtgcccatcgtcgtcaccggtaacgatttctcgacgctctacgctcctctgatccgtgatggtcgtatggagaagttctactgggctcccacccgtgacgaccgtatcggtgtctgcaagggtatcttccagaccgacaatgtctgtgacgagtctgtcgtaaagatcgtcgacaccttcccaggacaatccattgactttttcggtgctctgcgtgctcgggtgtacgacgatgaggtgcgcaagtgggtcggctctaccggaatcgagaacattggcaagaggctggtgaactcgcgggacgggcccgtgaccttcgagcagccaaagatgacagtcgagaagctgctagagtacgggcacatgctcgtccaggagcaggacaatgtcaagcgtgtgcagcttgctgacacctacatgagccaggcagctctgggtgatgctaaccaggatgcgatgaagactggttccttctacggttag

SEQ ID NO: 275 - protein, 427 aa, Hordeum vulgare
MAAAFSSTVGAPASTPTNFLGKKLKKQVTSAVNYHGKSSKANRFTVMAAENIDEKRNTDKWKGLATDISDDQQDITRGKGIVDSLFQAPTGDGTHEAVLSSYEYVSQGLRKYDFDNTMGGFYIAPAFMDKLVVHLSKNFMTLPNIKIPLILGIWGGKGQGKSFQCELVFAKMGINPIMMSAGELESGNAGEPAKLIRQRYREAADMIKKGKMCCLFINDLDAGAGRMGGTTQYTVNNQMVNATLMNIADAPTNVQLPGMYNKRENPRVPIVVTGNDFSTLYAPLIRDGRMEKFYWAPTRDDRIGVCKGIFQTDNVCDESVVKIVDTFPGQSIDFFGALRARVYDDEVRKWVGSTGIENIGKRLVNSRDGPVTFEQPKMTVEKLLEYGHMLVQEQDNVKRVQLADTYMSQAALGDANQDAMKTGSFYG

SEQ ID NO: 276 - DNA, 1278 bp, Hordeum vulgare
atggcttctgctttctcgtccaccgttggagctccggcgtcgaccccgaccatcttcctgggcaagaaggtgaagaactactaccatggtggcaacaagatgaagagcagggtggtgagggtcatggcggccaaaaaggaacttgaccagggcaagcagaccgatgcggaccggtggaagggtctggcctacgacatctcggacgaccagcaggacatcactcgggggaaaggcatcgtggactccctgttccaggcccccatgggcgacggcacccacgaggccatcctaagctcctacgagtacatcagccagggcctgcggaagtacgacttcgacaacaccatggacgggctgtacatcgcgccggcattcatggacaagctcatcgtccacctcgccaagaacttcatgacactccccaacatcaaggttcctctcatcctgggtatctggggaggcaagggacagggcaagtcgttccagtgtgagctggtgttcgccaagatgggcatcaaccccatcatgatgagcgccggtgagctggagagcggcaacggcgagccggccaagctgatccggcagaggtaccgcgaggcggccgacattatcaacaagggcaagatgtgctgcctcttcatcaacgacctggacgccggcgcgggccggatgggcgggacgacgcagtacacggtgaacaaccagatggtgaacgccaccctgatgaacatcgcggacgcgcccaccaacgtgcagctcccggggatgtacaacaaggaggagaacccccgcgtgcccatcatcgtcaccggcaacgacttctcgacgctgtacgctcccctgatccgtgacgggcgcatggagaagttctactgggcgcccacccgcgaggaccgcatcggcgtgtgcaagggcatcttccgcaccgacaacgtcccggacgaggccgtggtgaggctggtggacaccttcccggggcagtccatcgacttcttcggcgcgctgcgggcacgggtgtacgacgacgaggtgcgcaagtgggtcggcgagatcggcgtggagaacatctccaagcgcctcgtcaactccagggaggggccgcccacgttcgaccagcccaagatgaccatagagaagctcatggagtacggccacatgctggtccaggagcaggagaacgtcaagcgtgtgcagctcgccgacaagtacctcagcgaggcggcgctcggccaagccaacgacgacgccatgaagaccggtgccttctacggcaagtag

SEQ ID NO: 277 - protein, 425 aa, Hordeum vulgare
MASAFSSTVGAPASTPTIFLGKKVKNYYHGGNKMKSRVVRVMAAKKELDQGKQTDADRWKGLAYDISDDQQDITRGKGIVDSLFQAPMGDGTHEAILSSYEYISQGLRKYDFDNTMDGLYIAPAFMDKLIVHLAKNFMTLPNIKVPLILGIWGGKGQGKSFQCELVFAKMGINPIMMSAGELESGNGEPAKLIRQRYREAADIINKGKMCCLFINDLDAGAGRMGGTTQYTVNNQMVNATLMNIADAPTNVQLPGMYNKEENPRVPIIVTGNDFSTLYAPLIRDGRMEKFYWAPTREDRIGVCKGIFRTDNVPDEAVVRLVDTFPGQSIDFFGALRARVYDDEVRKWVGEIGVENISKRLVNSREGPPTFDQPKMTIEKLMEYGHMLVQEQENVKRVQLADKYLSEAALGQANDDAMKTGAFYGK

SEQ ID NO: 278 - DNA, 1308 bp, Larrea tridentata
  misc_feature (60)..(60): n is a, c, g, or t
  misc_feature (1110)..(1110): n is a, c, g, or t
atggctgctgcctactccaccgtcggagctgtcaacagggcaccgctgagcttgaatggntctggtgcgagagcttcattggttccaagcactgccttcttcggcagcagcttgaagaaatctgctgcgaaattccccaaggcgtcatcaggaaacttcaagattgttgcacaagaaattagtgaggatcagcagaccgacaaggacaaatggaagggtcttgcctatgacatttctgatgatcaacaggatatcactagaggaaagggtatggttgatactctcttccaagctcccatgcaatctggcactcactatgctgtcatgagttcttacgactacatcagtcaaggacttcgccagtacaacttggacaacaacatggacggtttctacatagcaccagccttcatggacaagcttgtcgtccacatcaccaagaacttcttgagtctccctaacatcaagattcctctgatcttgggtatctggggaggcaaaggtcaaggaaaatctttccaatgtgaacttgtttttgccaagatgggaatcaaccccatcatgatgagtgctggagagctggaaagtggaaatgcaggagaacctgccaagctgatcaggcaaaggtaccgtgaagctgctgacattatcaagaagggtaaaatgtgctgcctgttcatcaacgatctcgacgctggagctggtcgtatgggtggaacaactcaatacactgttaacaaccagatggtgaatgccaccctcatgaacattgctgacaacccaacaaatgtccagctccctggtatgtacaacaaggaagagaaccctcgtgtgcctatcattgtcactggtaacgacttctcgacattgtacgctcctcttatccgtgatggtcgtatggaaaaattctactgggctcctaccagggaagaccgtattggtgtctgcaagggtattttcaggactgacaatgttcctgaagaagacattgtcaaggttgtagaccaattccctggtcaatctattgatttctttggagccctgagggcaagagtgtacgatgatgaagtgaggaagtgggtttccgaagtcggtgtcgacaccatcggnaagaagctggtgaactcaaaggaaggacccccaacatttgagcagcccaagatgaccattgataagctcctgcaatatggaaacatgcttgtggaagagcaagaaaatgtgaagagagtccaattggctgacaagtacatgagtgaggctgcccttggtgatgctaaccaggatgctattaagaggggaactttctaa

SEQ ID NO: 279 - protein, 435 aa, Larrea tridentata
MAAAYSTVGAVNRAPLSLNGSGARASLVPSTAFFGSSLKKSAAKFPKASSGNFKIVAQEISEDQQTDKDKWKGLAYDISDDQQDITRGKGMVDTLFQAPMQSGTHYAVMSSYDYISQGLRQYNLDNNMDGFYIAPAFMDKLVVHITKNFLSLPNIKIPLILGIWGGKGQGKSFQCELVFAKMGINPIMMSAGELESGNAGEPAKLIRQRYREAADIIKKGKMCCLFINDLDAGAGRMGGTTQYTVNNQMVNATLMNIADNPTNVQLPGMYNKEENPRVPIIVTGNDFSTLYAPLIRDGRMEKFYWAPTREDRIGVCKGIFRTDNVPEEDIVKVVDQFPGQSIDFFGALRARVYDDEVRKWVSEVGVDTIGKKLVNSKEGPPTFEQPKMTIDKLLQYGNMLVEEQENVKRVQLADKYMSEAALGDANQDAIKRGTF

SEQ ID NO: 280 - DNA, 1380 bp, Lycopersicon pennellii
atggctgcctcagtgtcaaccattggagctgccagcaaagcaccattgagtttgaacaactcagttgctggaacttccgttccaagcacagccttctttggaaaatccttgaaaaaagtgtatgcaaaaggtgtttccagccccaaggtttcaaacaggaacttgagggttgtagctcaagaagtagacgaaacgaaagaggacagatggaagggtctttatgataacacatcggatgaccaacaggacattgcaaggggtaagggtctggtcgacagtcttttccaggctcctaccggtactggtactcaccacgccatcatgaattcctacgaatacgtcagccaggctcttaaaacgtaccaattggacaacaaattggacggcttctacattgcccctgctttcatggacaaacttgttgttcacatcaccaagaacttcttgacattgcccaacatcaaggttccactcatcttgggtgtatggggaggcaaaggtcaaggtaaatcattccaatgtgagcttgtcttcagaaagatgggaatcaaccccattatgatgagtgctggagaattggaaagtggaaatgcaggagagccagctaaattgattaggcaaaggtacagagaggcagctgaaatcatcaggaaaggaaacatgtgttgtctcttcatcaacgatctcgatgcaggagctggtagaatgggtggaactacccaatacaccgtcaacaaccagatggtgaatgccaccctcatgaacattgctgacaacccaacaaatgtccagctccccggtatgtacaacaagcaagagaacgccagggtacccattattgtcactggtaacgacttctccacattgtatgctcctcttatccgtgatggtcgtatggagaagttctactgggcaccaactagggaggatagaattggtgtttgcaagggtattttcagaactgacaacgtccctgaggaagctgttgtaaagattgtcgattccttccctggacaatctattgatttctttggtgctttgagggcccgagtatatgacgatgaagtgaggaaatgggtttcaggaactggaattgaactcattggtgaaaaacttttgaactctagagatggacccccaacttttgagcaaccaaaaatgacccttgagaagctccttgagtatggtaacatgcttgttcaagagcaagagaatgtcaagagagtccagttggctgaaacctatcttaaagaggcagctctcggagatgctaacgctgatgccatcaacactggaatttctaagaacttcaccaatctcaaaagtcgtctaaacaatgaagaggcgaaaaaagcgcgacatgtcaacttccaggagtga

SEQ ID NO: 281 - protein, 459 aa, Lycopersicon pennellii
MAASVSTIGAASKAPLSLNNSVAGTSVPSTAFFGKSLKKVYAKGVSSPKVSNRNLRVVAQEVDETKEDRWKGLYDNTSDDQQDIARGKGLVDSLFQAPTGTGTHHAIMNSYEYVSQALKTYQLDNKLDGFYIAPAFMDKLVVHITKNFLTLPNIKVPLILGVWGGKGQGKSFQCELVFRKMGINPIMMSAGELESGNAGEPAKLIRQRYREAAEIIRKGNMCCLFINDLDAGAGRMGGTTQYTVNNQMVNATLMNIADNPTNVQLPGMYNKQENARVPIIVTGNDFSTLYAPLIRDGRMEKFYWAPTREDRIGVCKGIFRTDNVPEEAVVKIVDSFPGQSIDFFGALRARVYDDEVRKWVSGTGIELIGEKLLNSRDGPPTFEQPKMTLEKLLEYGNMLVQEQENVKRVQLAETYLKEAALGDANADAINTGISKNFTNLKSRLNNEEAKKARHVNFQE

SEQ ID NO: 282 - DNA, 1314 bp, Malus domestica
atggccactgctgtctctaccattggatctgtcaacagagcaccgccgaacctgaatggctctagcagcagtgcttcagttccaagctcaacctttttgggaagcagcttgaagaaagtgaactcaaggttcacgaactccaaggtttcctccgggagtctcaggattgtcgcgagtgtggacgaagataagcagaccgacaaggacagatggaaaggccttgccttcgacacctccgacgaccaacaagacatcacaagaggaaagggtaaggtggactccctcttccaggcacctcaaggatcaggaactcactttgccatcatgagctcttatgaatacatcagcacgggccttcgccagtacaactttgacaataacatggacggttattatattgctcccgcttttatggacaagcttgttgttcacatcaccaagaacttcatgacccttcctaacatgaaggttcctctcatcttgggtatttggggaggcaaaggtcagggcaagtctttccagtgcgagcttgtctttgccaagatgagaatcagccctatcatgatgagtgccggagaattggaaagtggaaacgcaggagaacccgcgaagctgatcaggcaaaggtaccgtgaagcagccgacattatcaggaagggtaaaatgtgtgcactcttcatcaacgatcttgatgcaggagctggtcggcttggtggaaccacccaatacactgtcaacaaccaaatggtgaatgccaccctcatgaacattgctgataacccgacaaacgtccagcttccaggtatgtacaacaaggaggagaacccccgtgtcccaatcattgtcaccggtaacgatttctcaacattgtacgctcctctcatccgtgacggtcgtatggagaagttctactgggctcccacccgcgaagatcgtattggagtctgcattgggatcttcaggagtgacaatgttgctaaggaagacattgtcaagcttgttgacaccttcccaggccaatctattgatttctttggtgccttgagggctagggtttacgacgatgaagtgaggaagtggattacgggtgttggcgtggatagcattgggaagaagcttgtgaactcaaaggaaggacccccaactttcgagcagccgaagatgactatcgaaaagctcctcgagtacggaaacatgcttgtccaagagcaagagaatgtgaagagagttcaattggctgataagtacttgagcgaggctgctcttggtgatgctaactcagatgctatgaatacaggaactttctatggttag

SEQ ID NO: 283 - protein, 437 aa, Malus domestica
MATAVSTIGSVNRAPPNLNGSSSSASVPSSTFLGSSLKKVNSRFTNSKVSSGSLRIVASVDEDKQTDKDRWKGLAFDTSDDQQDITRGKGKVDSLFQAPQGSGTHFAIMSSYEYISTGLRQYNFDNNMDGYYIAPAFMDKLVVHITKNFMTLPNMKVPLILGIWGGKGQGKSFQCELVFAKMRISPIMMSAGELESGNAGEPAKLIRQRYREAADIIRKGKMCALFINDLDAGAGRLGGTTQYTVNNQMVNATLMNIADNPTNVQLPGMYNKEENPRVPIIVTGNDFSTLYAPLIRDGRMEKFYWAPTREDRIGVCIGIFRSDNVAKEDIVKLVDTFPGQSIDFFGALRARVYDDEVRKWITGVGVDSIGKKLVNSKEGPPTFEQPKMTIEKLLEYGNMLVQEQENVKRVQLADKYLSEAALGDANSDAMNTGTFYG

SEQ ID NO: 284 - DNA, 1329 bp, Nicotiana tabacum
atggctacctctgtctcaaccattggagctgttaacaaaacaccgttgagtttgaacaactcagttgctggaacttcagttccaagcacagccttctttggcaaaactttgaagaaagtgtatggaaaaggtgtttcaagccccaaggttacaaacaagagcttgaggattgtagctgaacaaatagatgttgatccgaagaaacagaccgacagtgacagatggaagggtcttgtccaagacttctccgatgatcaacaggacatcacccggggtaagggtatggttgacagtcttttccaggctccaacgggtactggtactcaccacgctgtgttgcaatcctacgaatacgtcagccaaggtcttcgccagtacaacttggacaacaagttggacggattctacatcgctcctgctttcatggacaagcttgttgttcacatcaccaagaacttcttgaaattgcccaacatcaaggttccacttatcttgggtatctggggaggcaaaggtcaaggcaaatcattccagtgtgaacttgtcttcagaaagatgggaatcaaccccattatgatgagtgctggagaattggaaagtggaaatgcaggagagccagccaagttgattaggcaaaggtacagagaagcagcagaaatcatcagaaagggaaatatgtgttgcctcttcatcaacgatctcgatgcaggagctggtagaatgggtggaactacccaatacactgtcaacaaccaaatggtgaatgccactctcatgaacattgctgacaacccgacaaatgtccagctccccggtatgtacaacaagcaagagaatgccagggtccctattatcgtcactggtaacgatttctccacattgtatgctccacttatccgtgatggtcgtatggagaagttctactgggcaccaactagggaagacagaattggtgtttgcacaggtattttcaggaccgacaatgttcctgctgaagacgttgtcaagattgttgataacttccctggacaatctatcgacttttttggtgcactgagggcgagagtatacgatgatgaagtaaggaagtgggtatcaggcactggaattgaaaagattggagacaaacttttgaactcttttgacggaccaccaacttttgagcaaccaaagatgaccattgagaagctcctcgagtacggtaatatgcttgtacaagagcaagaaaatgtgaagagagttcagttggctgacaaatacctcaaagaggctgcacttggtgatgccaatgctgatgccattaacaatggatccttctttgctagttag

SEQ ID NO: 285 - protein, 442 aa, Nicotiana tabacum
MATSVSTIGAVNKTPLSLNNSVAGTSVPSTAFFGKTLKKVYGKGVSSPKVTNKSLRIVAEQIDVDPKKQTDSDRWKGLVQDFSDDQQDITRGKGMVDSLFQAPTGTGTHHAVLQSYEYVSQGLRQYNLDNKLDGFYIAPAFMDKLVVHITKNFLKLPNIKVPLILGIWGGKGQGKSFQCELVFRKMGINPIMMSAGELESGNAGEPAKLIRQRYREAAEIIRKGNMCCLFINDLDAGAGRMGGTTQYTVNNQMVNATLMNIADNPTNVQLPGMYNKQENARVPIIVTGNDFSTLYAPLIRDGRMEKFYWAPTREDRIGVCTGIFRTDNVPAEDVVKIVDNFPGQSIDFFGALRARVYDDEVRKWVSGTGIEKIGDKLLNSFDGPPTFEQPKMTIEKLLEYGNMLVQEQENVKRVQLADKYLKEAALGDANADAINNGSFFAS

SEQ ID NO: 286 - DNA, 1401 bp, Oryza sativa
atggctgctgccttctcctccaccgttggagctccggcgtccactccgaccaacttcctggggaagaagctgaagaagcaggtgacatcggcggtgaactaccatggcaagagctccaacatcaacaggttcaaggtgatggccaaggagctggacgagggcaagcagaccgaccaggacaggtggaagggtctcgcctacgacatctccgatgaccagcaggacatcaccagggggaagggtttcgtcgactcccttttccaggctcccacgggtgatggcacccacgaggccgtcctcagctcctacgagtacctcagccagggtctcagaacgtacgacttcgacaacaccatgggaggcttctacatcgcccctgctttcatggacaagctcgtcgtccacatctccaagaacttcatgaccctccccaacatcaaggtcccactcatcctgggtatctggggaggcaagggtcagggaaaatccttccagtgtgagctcgtcttcgccaagatggggatcaaccccatcatgatgagcgccggagagctggagagcggcaacgccggagagccggcgaagctgatcaggcagcggtaccgtgaggcggcagacatcatcaagaaggggaagatgtgctgcctcttcatcaacgatctggacgcgggtgcaggtcgcatgggaggcaccacccagtacacggtgaacaaccagatggtgaacgccaccctgatgaacatcgccgacaacccaaccaacgtgcagctccccgggatgtacaacaaggaggacaacccccgtgtccccatcatcgtcaccggcaacgacttctccacgctgtacgcgccgctcatccgtgacgggcgtatggagaagttctactgggctcccacccgcgacgaccgtgtcggcgtctgcaagggtatcttccgcaccgacaacgtccccgacgaggacatcgtcaagatcgtcgacagcttcccaggccaatccatcgatttcttcggcgctcttcgtgcccgtgtttacgacgacgaggtgcgcaagtgggtgtcggacacgggtgtggagaacattggcaagaggctggtgaactcgagggagggcccaccggagttcgagcagcccaagatgacgatcgaaaagctcatggagtacggatacatgcttgtgaaggagcaggagaacgtcaagcgtgtgcagctggctgagcagtacttgagcgaggctgctcttggtgacgctaactccgacgccatgaagactggttccttctacgggcaaggagcacagcaagcaggtaacctgcctgtgccggaaggttgcaccgaccctgttgccaagaacttcgacccaacggcgaggagcgacgacggcagctgcctttacaccttttaa

SEQ ID NO: 287 - protein, 466 aa, Oryza sativa
MAAAFSSTVGAPASTPTNFLGKKLKKQVTSAVNYHGKSSNINRFKVMAKELDEGKQTDQDRWKGLAYDISDDQQDITRGKGFVDSLFQAPTGDGTHEAVLSSYEYLSQGLRTYDFDNTMGGFYIAPAFMDKLVVHISKNFMTLPNIKVPLILGIWGGKGQGKSFQCELVFAKMGINPIMMSAGELESGNAGEPAKLIRQRYREAADIIKKGKMCCLFINDLDAGAGRMGGTTQYTVNNQMVNATLMNIADNPTNVQLPGMYNKEDNPRVPIIVTGNDFSTLYAPLIRDGRMEKFYWAPTRDDRVGVCKGIFRTDNVPDEDIVKIVDSFPGQSIDFFGALRARVYDDEVRKWVSDTGVENIGKRLVNSREGPPEFEQPKMTIEKLMEYGYMLVKEQENVKRVQLAEQYLSEAALGDANSDAMKTGSFYGQGAQQAGNLPVPEGCTDPVAKNFDPTARSDDGSCLYTF

SEQ ID NO: 288 - DNA, 1302 bp, Oryza sativa
atggctgctgccttctcctccaccgttggagctccggcgtccactccgaccaacttcctggggaagaagctgaaaaagcaggtgacatcggcggtgaactaccatggcaagagctccaacatcaacaggttcaaggtgatggccaaggagctggacgagggcaagcagaccgaccaggacaggtggaagggtctcgcctacgacatctccgatgaccagcaggacatcaccagggggaagggtttcgtcgactcccttttccaggctcccacgggtgatggcacccacgaggccgtcctcagctcctacgagtacctcagccagggtctcagaacgtacgacttcgacaacaccatgggaggcttctacatcgcccctgctttcatggacaagctcgtcgtccacatctccaagaacttcatgaccctccccaacatcaaggtcccactcatcctgggtatctggggaggcaagggtcagggaaaatccttccagtgtgagctcgtcttcgccaagatggggatcaaccccatcatgatgagcgccggagagctggagagcggcaacgccggagagccggcgaagctgatcaggcagcggtaccgtgaggcggcagacatcatcaagaaggggaagatgtgctgcctcttcatcaacgatctggacgcgggtgcaggtcgcatgggaggcaccacccagtacacggtgaacaaccagatggtgaacgccaccctgatgaacatcgccgacaacccaaccaacgtgcagctccccgggatgtacaacaaggaggacaacccccgtgtccccatcatcgtcaccggcaacgacttctccacgctgtacgcgccgctcatccgtgacgggcgtatggagaagttctactgggctcccacccgcgacgaccgtgtcggcgtctgcaagggtatcttccgcaccgacaacgtccccgacgaggacatcgtcaagatcgtcgacagcttcccaggccaatccatcgatttcttcggcgctcttcgtgcccgtgtttacgacgacgaggtgcgcaagtgggtgtcggacacgggtgtggagaacattggcaagaggctggtgaactcgagggagggcccaccggagttcgagcagcccaagatgacgatcgaaaagctcatggagtacggatacatgcttgtgaaggagcaggagaacgtcaagcgtgtgcagctggctgagcagtacttgagcgaggctgctcttggtgacgctaactccgacgccatgaagactggttccttctacggttctgcgccatccagctga

SEQ ID NO: 289 - protein, 433 aa, Oryza sativa
MAAAFSSTVGAPASTPTNFLGKKLKKQVTSAVNYHGKSSNINRFKVMAKELDEGKQTDQDRWKGLAYDISDDQQDITRGKGFVDSLFQAPTGDGTHEAVLSSYEYLSQGLRTYDFDNTMGGFYIAPAFMDKLVVHISKNFMTLPNIKVPLILGIWGGKGQGKSFQCELVFAKMGINPIMMSAGELESGNAGEPAKLIRQRYREAADIIKKGKMCCLFINDLDAGAGRMGGTTQYTVNNQMVNATLMNIADNPTNVQLPGMYNKEDNPRVPIIVTGNDFSTLYAPLIRDGRMEKFYWAPTRDDRVGVCKGIFRTDNVPDEDIVKIVDSFPGQSIDFFGALRARVYDDEVRKWVSDTGVENIGKRLVNSREGPPEFEQPKMTIEKLMEYGYMLVKEQENVKRVQLAEQYLSEAALGDANSDAMKTGSFYGSAPSS

SEQ ID NO: 290 - DNA, 1326 bp, Phaseolus vulgaris
atggctgcctccctctccactgtcggcgctgtcaacagaacccttttgaatctgaatggatctggaggcggagcttcaggtcccagttcagctttctttggcacaagcttgaagaaggttattagctcaagggtccctaacagcaagttgacatctggaagcttcaaaattgttgctgcagacaaagagatcgaggagacccagcagaccgagggggacagatggaggggtctagcctacgatgtttctgatgaccaacaagacatcacaagagggaagggtttggttgattctcttttccaagctccaatggatgctggaactcactatgcagtcatcagctcccacaagtacctcagcgctggactacgccagtacaactttgacaacatcaaggatggtttctacattgctccagcttttttggacaagcttgttgttcacatcgccaagaacttcatgaccttgcccaacatcaaggttcctctcattcttggtgtctggggaggcaagggacaaggaaaatctttccaatgtgagcttgtctttgccaagatgggaatcaaccccatcatgatgagtgctggagagttggaaagtggaaatgccggagagccagcaaaattgattaggcagagataccgtgaagcctcagacttaatcaagaagggaaagatgtgtgttctgttcatcaatgatcttgatgcaggagcaggtcgtcttggtggaaccacccaatacactgtgaacaaccagatggtgaatgccactctcatgaacattgctgataaccccacaaatgtgcagcttcctggtatgtacaacaaggaagataacgcccgtgtgcccatcattgtcactggtaacgatttctcaacactttatgctcctctcatccgtgatggtcgtatggagaagttctactgggcaccaacaagggaagaccgcattggtgtttgcaagggaattttccggaccgatggtgttcctgaaaaggacattgtcgagcttgttgacaaacaccctggccaatccattgatttctttggtgcactgagggccagagtgtatgatgatgaagtaaggaagtggatttctggtgttggtgttgattctgttgggaagaagcttgtgaactcaaaggaaggacctcctacctttgaccagcccaagatgactctggacaagctcttgctgtatgctagcatgcttgtccaagaacaagagaatgtgaagagagtccaattggctgaccagtacttgaatgaggctgctcttggaaatgccaacgaggatgctatcaagagtggatctttcttcaaatag

SEQ ID NO: 291 - protein, 441 aa, Phaseolus vulgaris
MAASLSTVGAVNRTLLNLNGSGGGASGPSSAFFGTSLKKVISSRVPNSKLTSGSFKIVAADKEIEETQQTEGDRWRGLAYDVSDDQQDITRGKGLVDSLFQAPMDAGTHYAVISSHKYLSAGLRQYNFDNIKDGFYIAPAFLDKLVVHIAKNFMTLPNIKVPLILGVWGGKGQGKSFQCELVFAKMGINPIMMSAGELESGNAGEPAKLIRQRYREASDLIKKGKMCVLFINDLDAGAGRLGGTTQYTVNNQMVNATLMNIADNPTNVQLPGMYNKEDNARVPIIVTGNDFSTLYAPLIRDGRMEKFYWAPTREDRIGVCKGIFRTDGVPEKDIVELVDKHPGQSIDFFGALRARVYDDEVRKWISGVGVDSVGKKLVNSKEGPPTFDQPKMTLDKLLLYASMLVQEQENVKRVQLADQYLNEAALGNANEDAIKSGSFFK

SEQ ID NO: 292 - DNA, 1299 bp, Triticum aestivum
atggcttctgctttctcgtccaccgttggagctccggcgtcgaccccgaccaccttcctcgggaagaaggtgaagaagcaggccggtgcgttgaactactaccatggtggcaacaagatcaacaatagggtggtcagggccatggcggccaaaaaggaacttgacgagggcaagcagaccgatgccgatcggtggaagggtctcgcttacgacatctccgatgaccagcaggacatcacgagggggaaaggcatcgtggactccctgttccaggcccccatgggcgacggcacccacgaggccatcctgagctcctacgagtacatcagccagggcctgcgcaagtacgacttcgacaacaccatggacgggctgtacatcgccccggcgttcatggacaagctcatcgtccacctcgccaagaacttcatgacactccccaacatcaaggtccctctcatcctgggtatctggggaggcaagggacagggcaagtcgttccagtgcgagctggtgttcgccaagatgggcatcaaccccatcatgatgagcgccggagagctggagagcggcaacgccggcgagccggccaagctgatccggcagaggtaccgcgaggctgccgacattatcaagaagggcaagatgtgctgcctcttcatcaacgacctggacgccggcgcggggcggatgggcgggacgacgcagtacacggtgaacaaccagatggtgaacgccaccctgatgaacatcgcggacgcgcccaccaacgtgcagttcccggggatgtacaacaaggaggagaacccacgcgtgcccatcatcgtcaccggcaacgacttctcgacgctgtacgcgcccctcatccgggacggccgcatggagaagttctactgggcgcccacccgggaggaccgcatcggcgtgtgcaagggcatcttccgcaccgacaacgtccccgacgaggccgtggtgaggctggtggacaccttcccggggcagtccatcgacttcttcggcgcgctgcgggcgcgggtgtacgacgacgaggtgcgcaagtgggtcggcgagatcggcgtcgagaacatctccaagcggctcgtcaactccagggaggggccgccgacgttcgaccagcccaagatgaccatcgagaagctcatggagtacggccacatgctggtccaggagcaggagaacgtgaagcgcgtgcagctcgccgacaagtacctcagcgaggcggcgctcggccaagccaacgacgacgccatggcgaccggcgccttctacggcaagtag

SEQ ID NO: 293 - protein, 432 aa, Triticum aestivum
MASAFSSTVGAPASTPTTFLGKKVKKQAGALNYYHGGNKINNRVVRAMAAKKELDEGKQTDADRWKGLAYDISDDQQDITRGKGIVDSLFQAPMGDGTHEAILSSYEYISQGLRKYDFDNTMDGLYIAPAFMDKLIVHLAKNFMTLPNIKVPLILGIWGGKGQGKSFQCELVFAKMGINPIMMSAGELESGNAGEPAKLIRQRYREAADIIKKGKMCCLFINDLDAGAGRMGGTTQYTVNNQMVNATLMNIADAPTNVQFPGMYNKEENPRVPIIVTGNDFSTLYAPLIRDGRMEKFYWAPTREDRIGVCKGIFRTDNVPDEAVVRLVDTFPGQSIDFFGALRARVYDDEVRKWVGEIGVENISKRLVNSREGPPTFDQPKMTIEKLMEYGHMLVQEQENVKRVQLADKYLSEAALGQANDDAMATGAFYGK

SEQ ID NO: 294 - DNA, 1299 bp, Zea mays
atggccgccttctcctccaccgtcggagctccggcctccaccccgaccaggagcagcttcctcgggaagaagctcaacaagccgcaggtgtccgcggccgtgacctaccatggcaagagctccagcagcaacagcaggttcaaggcgatggctgccaaggaggtggacgagacgaagcagaccgacgaggacaggtggaagggcctggcctacgacatctcggacgaccagcaggacatcaccaggggcaagggcctcgtcgacaacctcttccaggcgcctatgggggacggcacccacgtcgccgtgctcagctcctacgactacatcagccagggccaaaagtcttacaacttcgacaacatgatggatggcttctacatagccaagggcttcatggacaagctcgtcgtccacctctccaagaacttcatgaccctgccaaacatcaaggttcccctcatcctgggtatctggggaggcaaaggccagggaaaatcgttccaatgcgagctggtcttcgccaagatgggcatcacccccatcatgatgagcgccggcgagctggagagcggcaacgccggagagcccgccaagctcatcaggcagcgctaccgtgaggcctccgacctcatcaagaagggcaagatgtcctgcctcttcatcaacgacctcgacgccggcgcgggtcgcatgggcggcaccacccagtacacggtgaacaaccagatggtcaacgccaccctgatgaacatcgccgacaaccccaccaacgtgcagctcccggggatgtacaacaaggaggacaacccccgcgtgcccatcatcgtcaccggcaacgacttctccacgctctacgcgccgctcatccgcgacggccgcatggagaagttctactgggcgcccacccgcgaggaccgcatcggcgtctgcaagggcatcttccgcaccgacggcgtcgacgaggagcacgtcgtccagctggtcgacaccttccctggccagtccatcgacttcttcggcgcgctgcgtgcccgggtctacgacgacgaggtccgacggtgggtgagcgagaccggcgtcgagaacatcgccaggaagctcgtcaactccaaggagggcccgcccacgttcgagcagcccaagataacgatcgagaagctcttggagtacggacacatgctggtggcggagcaggagaacgtcaagcgtgtgcagcttgctgacaagtacctcaacgaggctgctcttggtgaagccaacgaggacgccatgaagactggctccttcttcaagtag

SEQ ID NO: 295 - protein, 432 aa, Zea mays
MAAFSSTVGAPASTPTRSSFLGKKLNKPQVSAAVTYHGKSSSSNSRFKAMAAKEVDETKQTDEDRWKGLAYDISDDQQDITRGKGLVDNLFQAPMGDGTHVAVLSSYDYISQGQKSYNFDNMMDGFYIAKGFMDKLVVHLSKNFMTLPNIKVPLILGIWGGKGQGKSFQCELVFAKMGITPIMMSAGELESGNAGEPAKLIRQRYREASDLIKKGKMSCLFINDLDAGAGRMGGTTQYTVNNQMVNATLMNIADNPTNVQLPGMYNKEDNPRVPIIVTGNDFSTLYAPLIRDGRMEKFYWAPTREDRIGVCKGIFRTDGVDEEHVVQLVDTFPGQSIDFFGALRARVYDDEVRRWVSETGVENIARKLVNSKEGPPTFEQPKITIEKLLEYGHMLVAEQENVKRVQLADKYLNEAALGEANEDAMKTGSFFK

SEQ ID NO: 296 - DNA, 1122 bp, Datisca glomerata
atggcttcttccgctgtctcaaccattggagcagtcaacagatcccctttaaatttgaacaacaatggaactggagggttgctgccaaacacagccttctttggcagcagtctgaagaagatgaactcaagattgaccaatccgaggattgctgctggcaacattaaggctgttgctgacgatgacgaggaaaaacaaacatcgaaggacaggtggggaggccttgcctttgacacatctgatgaccaacaagacattaccagaggaaagggaatggttgattcccttttccaagctcccatgcaaactggaactcactatgctgtcatgagctcttatgaatacctcagcactggtcttcgccaatacttggataacaatatggatggattctacatagctccagctttcatggacaagcttgtcgttcacatcaccaaaaacttcatgactctccccaacataaaggttcctctcattttgggtatctggggaggtaaaggtcaaggtaaatctttccagtgtgagcttgtctttgccaagatgggaatcaaccccatcatgatgagtgccggagaattggagagcggcaacgcaggagagcccgcgaagttgatcaggcaacggtgtcgtgaggcggccgacatcatcaagaagggaaagatgtcttgcctatttatcaatgatcttgatgcaggtgccggtaggcttggtgggacaactcaatacactgtgaacaaccaaatggtgaatgctaccctcatgaacattgctgacaatccaaccaatgttcagctcccgggtatgtacaacaaggaagagaatccacgtgtaccgatcatcgtcacaggtaatgacttctcgacattgtacgctcctctcattcgtgatggtcgtatggagaaattctactgggcgcccaccagagaagaccgaattggtgtctgcactggtatcttcagaagtgacaatgtggctaaggaagatattgtcaagcttgttgacacattccctggtcaatctattgatttcttcggggcgctaagagcacgggtttacgacgacgaagtgaggaagtggatatcgggtgtcggagtacaggacgttggaaaaagcttgtga

SEQ ID NO: 297 - protein, 373 aa, Datisca glomerata
MASSAVSTIGAVNRSPLNLNNNGTGGLLPNTAFFGSSLKKMNSRLTNPRIAAGNIKAVADDDEEKQTSKDRWGGLAFDTSDDQQDITRGKGMVDSLFQAPMQTGTHYAVMSSYEYLSTGLRQYLDNNMDGFYIAPAFMDKLVVHITKNFMTLPNIKVPLILGIWGGKGQGKSFQCELVFAKMGINPIMMSAGELESGNAGEPAKLIRQRCREAADIIKKGKMSCLFINDLDAGAGRLGGTTQYTVNNQMVNATLMNIADNPTNVQLPGMYNKEENPRVPIIVTGNDFSTLYAPLIRDGRMEKFYWAPTREDRIGVCTGIFRSDNVAKEDIVKLVDTFPGQSIDFFGALRARVYDDEVRKWISGVGVQDVGKSL

SEQ ID NO: 298 - DNA, 1308 bp, Zantedeschia aethiopica
gccgtctccagcgtcggtgccgtgaacagggtccggcctagcctacatgggtctggttcgggagcctcggtgacgaggtccggcttcctgggcaccagcctgaagacggtgaaccccagcttgggtcatggcaggacctccactgggaccttgaaggtcatggctgctgacctcgacgagagcaagcagaccaagacagacaggtgggctgggctgtacaccgacacctcggatgaccagcaggacatcaccagggggaagggcatggtcgactccctgttccaggctcccatgggcgacggaacccacaaccccgtcctgagctcctacgagtacatcagcaccggtctccgctcgttcaacttggacaacaccgtgaatggtttatacatcgctccggccttcatggacaagcttgtcgttcacatcaccaagaacttcatgaacttgcccaacatcaagattcctctcattttgggtatctggggaggcaaaggtcaagggaaatccttccaatgtgaacttgtgttcgccaagatgggaatcaaccccatcatgatgagcgccggtgagctggagagcggcaacgccggagagccggcgaagctgatccggcagcggtaccgtgaggccgccgacatcatcaggaaggggaagatgtgctgcctcttcatcaacgatctcgatgccggtgccggccggatgggcggcaccacccagtacaccgtcaacaaccagatggtgaacgccaccctcatgaacatcgccgacaaccccaccaacgtccagctccccggcatgtacaacaagcaagagaacccccgcgtgcccatcatcgtcaccggcaacgacttctccaccctctacgcccccctcatccgtgacggtcgtatggagaagttctactgggctcccaccagggatgaccgggtcggcgtctgcaccggtatcttcaggtccgacaacgtccccaaggaggatgtcatcaagctcgtcgacaccttccccggccaatccattgacttcttcggtgcactgagggcgagggtctacgacgacgaggtgaggaagtggattgccgaaatcggcgtcgacggcgtggggaagaggctggtgaactcgctggaggggccgccgacgttcgcgcagcccaagatgaccctggacaagctgctggagtacggcaatatgctggtgcaggaacaggagaacgtgaagagggtgcagctggccgacaagtacctgagcgaggcagctcttggtgacgccaatcaggacgcgatcaagactggatccttctatggttag

SEQ ID NO: 299 - protein, 435 aa, Zantedeschia aethiopica
AVSSVGAVNRVRPSLHGSGSGASVTRSGFLGTSLKTVNPSLGHGRTSTGTLKVMAADLDESKQTKTDRWAGLYTDTSDDQQDITRGKGMVDSLFQAPMGDGTHNPVLSSYEYISTGLRSFNLDNTVNGLYIAPAFMDKLVVHITKNFMNLPNIKIPLILGIWGGKGQGKSFQCELVFAKMGINPIMMSAGELESGNAGEPAKLIRQRYREAADIIRKGKMCCLFINDLDAGAGRMGGTTQYTVNNQMVNATLMNIADNPTNVQLPGMYNKQENPRVPIIVTGNDFSTLYAPLIRDGRMEKFYWAPTRDDRVGVCTGIFRSDNVPKEDVIKLVDTFPGQSIDFFGALRARVYDDEVRKWIAEIGVDGVGKRLVNSLEGPPTFAQPKMTLDKLLEYGNMLVQEQENVKRVQLADKYLSEAALGDANQDAIKTGSFYG

SEQ ID NO: 300 - DNA, 1245 bp, Anabaena variabilis
atgagttattatatcgctccgcgctttctggataaacttgctgttcacatcaccaaaaactttttaaatattcctggtgtgcgagttcccttaattttagggattcatggacgtaaaggagaagggaaaacctttcagtgtgagttagcttttgagaagatgggtattgaagtcacactcatctccggcggtgaattggaaagtcccgatgcgggagacccagcccggttgattcggctgcgctatcgggaaacggcagaactgattaaagtgcggggtaaaatgtgcgtgctgatgattaacgatttagatgcaggtgcaggacgctttgatgaaggtacgcaatatactgtaaatactcagttggtaaatgccacactgatgaatattgccgataatcccacagatgtacagttacccggtagttatgattccaacccgatacggcgtgtccccattatcgtgacaggtaatgatttttctactctctacgcaccattgattcgggatggacggatggagaaattctattgggaacccaaccgcgatgataaggtgggaattgtcggggggatttttgctgaggatggactctcaaaacgagaaattgaacaattagttgatactttccccaagcaatcgattgacttttttagcgctttacgttctcgaatttacgacgaacaaatccgcgactttatccatcaagttgggtttgaacgtatatctctacgtgttgtgaacagcgtagaagcgccgccagaatttaaaaagccagatttcagccttgctcatttgatcgagtctggtaacttggtgttgggtgaacaacaacgggtagacaattctcagctagtggatgagtataatcgattgaatcgcgggaggggttatcaagcagcgccaccgcctgaagcgcccatgattcagccagtcaataatagttctcacaagcgagagacatctaatactcatttgagtttagaaacccaagaacaaatccggcaaatcttgtctcaaggtcacaaaattacttttgaacacgtagatgcacgccgcttccgcacgggttcttggcaaagttgcggtactctgcatattgatgcagagtcagatgctatttcaacactagaggcttgcttagttgattatgagggtgagtatgtgcgcttggtagggatagacccgaaaggtaagcggcgggttgtggagacaattattcaacgaccaaatgacaaaaactaa

SEQ ID NO: 301 - protein, 414 aa, Anabaena variabilis
MSYYIAPRFLDKLAVHITKNFLNIPGVRVPLILGIHGRKGEGKTFQCELAFEKMGIEVTLISGGELESPDAGDPARLIRLRYRETAELIKVRGKMCVLMINDLDAGAGRFDEGTQYTVNTQLVNATLMNIADNPTDVQLPGSYDSNPIRRVPIIVTGNDFSTLYAPLIRDGRMEKFYWEPNRDDKVGIVGGIFAEDGLSKREIEQLVDTFPKQSIDFFSALRSRIYDEQIRDFIHQVGFERISLRVVNSVEAPPEFKKPDFSLAHLIESGNLVLGEQQRVDNSQLVDEYNRLNRGRGYQAAPPPEAPMIQPVNNSSHKRETSNTHLSLETQEQIRQILSQGHKITFEHVDARRFRTGSWQSCGTLHIDAESDAISTLEACLVDYEGEYVRLVGIDPKGKRRVVETIIQRPNDKN

SEQ ID NO: 302 - DNA, 1245 bp, Nostoc sp.
atgagttattatatcgctccgcgttttctggataaacttgctgttcacatcactaaaaactttttgaatattcctggtgtgcgagttcccttaattttagggattcatggacgtaaaggagaagggaaaacctttcaatgtgagttagcttttgaaaagatgggtattgaagtcacactcatctctggcggtgaattggaaagtcccgatgcgggagacccagcacggttgattcggctgcgttatcgggaaacggcagaactgatcaaagtgcgcggtaaaatgtgcgtgctgatgattaacgatttagatgcaggtgcaggacgctttgatgaaggtacgcaatatactgtaaatactcagttggtaaatgccacgctgatgaatattgctgataatcctacagatgtgcagttaccgggtagttatgattccaacccgatacggcgtgtccccattatcgtcacaggtaatgatttttctactctctacgcgccattgattcgggatggacggatggagaaattctattgggaacccaaccgtgatgataaggtgggaattgttggggggatttttgcggaagatggactgtcacaacgggaaattgagcaattagttgatactttccccaagcaatcgattgacttttttagcgctttacgttctcgaatttacgatatccaaatccgcgacttcatccataaagtcgggtttgaacggatatctttgcgcgtagtgaacagcctagaagcgccgccagaatttaaaaagccagatttcagcctggctcatttaatcgagtctggtaacttggtgttgggtgaacaacaacgggtagataattctcagttagtggatgagtataatcgattaaatcgcgggagaggttatcaaacagcgccaccccccgaagcaccagtgattcagccagtcaataatagttctcacaagcaaaagacatctaatactcatttgagtttagaaacccaagaacaaatccggcaaatcttgtctcaaggtcacaaaattacctttgaacacgtagatgcacgccgtttccgcacgggttcttggcagagttgcggtactctgcatattgatgcagagtcagatgctatttcaactttagaggcttgcttagttgattatgacggtgagtatgtgcggatggtagggatagacccgaaaggcaagcggcgggttgtagagacaattattcaacgaccaaatggcaaaaattaa

SEQ ID NO: 303 - protein, 414 aa, Nostoc sp.
MSYYIAPRFLDKLAVHITKNFLNIPGVRVPLILGIHGRKGEGKTFQCELAFEKMGIEVTLISGGELESPDAGDPARLIRLRYRETAELIKVRGKMCVLMINDLDAGAGRFDEGTQYTVNTQLVNATLMNIADNPTDVQLPGSYDSNPIRRVPIIVTGNDFSTLYAPLIRDGRMEKFYWEPNRDDKVGIVGGIFAEDGLSQREIEQLVDTFPKQSIDFFSALRSRIYDIQIRDFIHKVGFERISLRVVNSLEAPPEFKKPDFSLAHLIESGNLVLGEQQRVDNSQLVDEYNRLNRGRGYQTAPPPEAPVIQPVNNSSHKQKTSNTHLSLETQEQIRQILSQGHKITFEHVDARRFRTGSWQSCGTLHIDAESDAISTLEACLVDYDGEYVRMVGIDPKGKRRVVETIIQRPNGKN

SEQ ID NO: 304 - DNA, 1224 bp, Synechococcus sp.
atgagctactacatcccccccacctttcttaaagttgtcgccctgcacctgaccaaaaatcatcttcctctgcccgacgtgcccgttccgctcatcttgggcatccacgggcgcaagggggagggcaagaccttccaatgcaacctcatctttgagcgcatgaaggtctatgccgtccacatctcggggggcgagctggaaagtcccgacgccggggatcccgcccgtatgattcgcctgcgctaccgtgaagctgccgagcacatccgcaaatttggccagatggccgtgctgatgatcaacgacctggatgccggcgccggtcgcctgaacagcatgacccagtacaccgtcaacacccaactggtgagcgccaccctgatgaacatcgccgacaaccccaccaacgtgcagcttcccggcagctacgatcccaagcccctgccgcgggtgcccatcatcgccaccggcaacgacttttccaccctctatgcccccctcatccgcgatgggcgcatgcgcaagttctactgggagcccagccgcaccgaccgcatccacatcgttcacggcatttttcaagccgacgggctgtctcttgaggagattgagcgcctggtggacgcctttcccgagcaggccatcgactttttcggcgccctgcgcgcccagctctacgacgagcaggtatggcaatttatccaagaagtcggcctggaagggattgcctttcgcctgctcaaaagcaaagagggcgccccccagtttccgccaccgcgattttctctggagcagttgatccaggccggccaccagctcaaagccgagcaacaccaagtagaagcccgtcgcctctccgaggaataccttggcctccggcgctccgctcctcaagagccgccccccgcttccccgccatcccctcctcctgtggctgccaactcggccgatcctgccccagtctccctcaacccagacgtgcaggcccagcttcgccagatcctggcccaaggctatgagatcctggtggagcatgcggatccgcgccgctaccgcgttcattcctggcaggagtgtggagttgcccacctgagagaatgggccgctgcctgtcaggctgtcgagcagtgcctcagccgttttcccaaggactacatccggctggtgggcgtagatccggtgaaaaaacaacggcgggtcgaggccatcatccaccgcccctga

SEQ ID NO: 305 - protein, 407 aa, Synechococcus sp.
MSYYIPPTFLKVVALHLTKNHLPLPDVPVPLILGIHGRKGEGKTFQCNLIFERMKVYAVHISGGELESPDAGDPARMIRLRYREAAEHIRKFGQMAVLMINDLDAGAGRLNSMTQYTVNTQLVSATLMNIADNPTNVQLPGSYDPKPLPRVPIIATGNDFSTLYAPLIRDGRMRKFYWEPSRTDRIHIVHGIFQADGLSLEEIERLVDAFPEQAIDFFGALRAQLYDEQVWQFIQEVGLEGIAFRLLKSKEGAPQFPPPRFSLEQLIQAGHQLKAEQHQVEARRLSEEYLGLRRSAPQEPPPASPPSPPPVAANSADPAPVSLNPDVQAQLRQILAQGYEILVEHADPRRYRVHSWQECGVAHLREWAAACQAVEQCLSRFPKDYIRLVGVDPVKKQRRVEAIIHRP

SEQ ID NO: 306 - DNA, 2193 bp, Oryza sativa; identical to SEQ ID NO: 146

SEQ ID NO: 307 - DNA, 1130 bp, Oryza sativa
catgcggctaatgtagatgctcactgcgctagtagtaaggtactccagtacattatggaatatacaaagctgtaatactcgtatcagcaagagagaggcacacaagttgtagcagtagcacaggattagaaaaacgggacgacaaatagtaatggaaaaacaaaaaaaaacaaggaaacacatggcaatataaatggagaaatcacaagaggaacagaatccgggcaatacgctgcgaaagtactcgtacgtaaaaaaaagaggcgcattcatgtgtggacagcgtgcagcagaagcagggatttgaaaccactcaaatccaccactgcaaaccttcaaacgaggccatggtttgaagcatagaaagcacaggtaagaagcacaacgccctcgctctccaccctcccacccaatcgcgacgcacctcgcggatcggtgacgtggcctcgccccccaaaaatatcccgcggcgtgaagctgacaccccgggcccacccacctgtcacgttggcacatgttggttatggttcccggccgcaccaaaatatcaacgcggcgcggcccaaaatttccaaaatcccgcccaagcccctggcgcgtgccgctcttccacccaggtccctctcgtaatccataatggcgtgtgtaccctcggctggttgtacgtgggcgggttaccctgggggtgtgggtggatgacgggtgggcccggaggaggtccggccccgcgcgtcatcgcggggcggggtgtagcgggtgcgaaaaggaggcgatcggtacgaaaattcaaattaggaggtggggggcggggcccttggagaataagcggaatcgcagatatgcccctgacttggcttggctcctcttcttcttatcccttgtcctcgcaaccccgcttccttctctcctctcctcttctcttctcttctctggtggtgtgggtgtgtccctgtctcccctctccttcctcctctcctttcccctcctctcttcccccctctcacaagagagagagcgccagactctccccaggtgaggtgagaccagtctttttgctcgattcgacgcgcctttcacgccgcctcgcgcggatctgaccgcttccctcgcccttctcgcaggattcagcc

SEQ ID NO: 308 - DNA, 1179 bp, Oryza sativa
ttgcagttgtgaccaagtaagctgagcatgcccttaacttcacctagaaaaaagtatacttggcttaactgctagtaagacatttcagaactgagactggtgtacgcatttcatgcaagccattaccactttacctgacattttggacagagattagaaatagtttcgtactacctgcaagttgcaacttgaaaagtgaaatttgttccttgctaatatattggcgtgtaattcttttatgcgttagcgtaaaaagttgaaatttgggtcaagttactggtcagattaaccagtaactggttaaagttgaaagatggtcttttagtaatggagggagtactacactatcctcagctgatttaaatcttattccgtcggtggtgatttcgtcaatctcccaacttagtttttcaatatattcataggatagagtgtgcatatgtgtgtttatagggatgagtctacgcgccttatgaacacctacttttgtactgtatttgtcaatgaaaagaaaatcttaccaatgctgcgatgctgacaccaagaagaggcgatgaaaagtgcaacggatatcgtgccacgtcggttgccaagtcagcacagacccaatgggcctttcctacgtgtctcggccacagccagtcgtttaccgcacgttcacatgggcacgaactcgcgtcatcttcccacgcaaaacgacagatctgccctatctggtcccacccatcagtggcccacacctcccatgctgcattatttgcgactcccatcccgtcctccacgcccaaacaccgcacacgggtcgcgatagccacgacccaatcacacaacgccacgtcaccatatgttacgggcagccatgcgcagaagatcccgcgacgtcgctgtcccccgtgtcggttacgaaaaaatatcccaccacgtgtcgctttcacaggacaatatctcgaaggaaaaaaatcgtagcggaaaatccgaggcacgagctgcgattggctgggaggcgtccagcgtggtggggggcccacccccttatccttagcccgtggcgctcctcgctcctcgggtccgtgtataaataccctccggaactcactcttgctggtcaccaacacgaagcaaaaggacaccagaaacatagtacacttgagctcactccaaactcaaacactcacacca

SEQ ID NO: 309 - DNA, 55 bp, Artificial sequence
  primer: prm08444
ggggacaagtttgtacaaaaaagcaggcttaaacaatgcaggtcaccatgaagag

SEQ ID NO: 310 - DNA, 50 bp, Artificial sequence
  primer: prm08445
ggggaccactttgtacaagaaagctgggtctcctacagaggaggcacatc

SEQ ID NO: 311 - protein, 199 aa, Artificial sequence
  Chlre_RCA domain
ILGIWGGKGQGKTFQCALAYKKLGIAPIVMSAGELESGNAGEPAKLIRTRYREASDIIKKGRMCSLFINDLDAGAGRMGDTTQYTVNNQMVNATLMNIADNPTNVQLPGVYKNEEIPRVPIVCTGNDFSTLYAPLIRDGRMEKYYWNPTREDRIGVCMGIFQEDNVQRREVENLVDTFPGQSIDFFGALRARVYDDMVR

SEQ ID NO: 312 - protein, 8 aa, Artificial sequence
  Motif 1
  VARIANT (2)..(2): Xaa is Gly or Arg
  VARIANT (5)..(5): Xaa is Gln or Glu
  VARIANT (8)..(8): Xaa is Ser or Thr
GXKGXGKX

SEQ ID NO: 313 - DNA, 1317 bp, Flaveria bidentis
atggccaccgccgccatcggagccaccttcaaccgcaccccgttgagcagtggtgttgctgcggtcccgagttcgagcttcttaggcactagcttgaagaagattgtgaactcgagacatgcagtcaacaacaacaagttttccactttcaagatctttgcagccgagaaagagatcgaagagaccaaacaaaccgacaaagatagatggagaggactcgcgtatgatatgtcggatgatcaacaagacatcactagaggtaagggtatggttgattctctcttccaggctccacaagattctggaacccatttcgctgtcatgagttcctacgaatacatcagcactggtcttcgcacatatttggacaacaacatggatggattctatatcgcgcctgcgtttatggacaagctcgttgttcacatcaccaagaacttcatgactttgcccaacattaaggtccctctaattttgggtgtttggggaggcaaaggtcagggtaaatctttccaatgtgaacttgtgtttgccaagatgggaatcacaccgattatgatgagtgctggagaattggaaagtggaaacgccggagagcccgcgaagctcatcagacagcggtaccgtgaggcggccgatatcatcaagaaggggaaaatgtgttgcctcttcatcaatgatcttgatgcaggagcaggtagaatgggtggaacaacacaatacacagtcaacaaccagatggtcaacgctaccctcatgaacattgctgataaccccaccaatgtgcaactgcctggaatgtacaacaaggaggagaacccgcgtgtcccgatcatcgtcacaggaaacgacttttcgacactctatgctcccctcattcgtgacggtcgtatggaaaagttctattgggctcccactagagatgaccgaattggcgtgtgtattggtattttccgcactgacaatgtcccgaaagaagacattgtcaaactcgtcgatactttccctggacaatccattgatttctttggcgcgttgagggctagagtgtacgacgatgaagtgaggaagtggatcggagaagttggtgttgaaaccattggaaagaagcttgtgaactcaagggaaggacccccgacattcgagcaacccaaaatgacaatcgataagctccttgagtacggatacatgcttgttcaggaacaagagaatgtgaagagagtccagttggccgatacctatttggattctgcggcgcttggtgacgctaacaaggatgccatggagactggcaaattctttgccggaaaagaatag

SEQ ID NO: 314 - protein, 438 aa, Flaveria bidentis
MATAAIGATFNRTPLSSGVAAVPSSSFLGTSLKKIVNSRHAVNNNKFSTFKIFAAEKEIEETKQTDKDRWRGLAYDMSDDQQDITRGKGMVDSLFQAPQDSGTHFAVMSSYEYISTGLRTYLDNNMDGFYIAPAFMDKLVVHITKNFMTLPNIKVPLILGVWGGKGQGKSFQCELVFAKMGITPIMMSAGELESGNAGEPAKLIRQRYREAADIIKKGKMCCLFINDLDAGAGRMGGTTQYTVNNQMVNATLMNIADNPTNVQLPGMYNKEENPRVPIIVTGNDFSTLYAPLIRDGRMEKFYWAPTRDDRIGVCIGIFRTDNVPKEDIVKLVDTFPGQSIDFFGALRARVYDDEVRKWIGEVGVETIGKKLVNSREGPPTFEQPKMTIDKLLEYGYMLVQEQENVKRVQLADTYLDSAALGDANKDAMETGKFFAGKE

SEQ ID NO: 315 - DNA, 1248 bp, Ostreococcus lucimarinus
atgtccacgatcacgcagccgcgatgcggcgtcaaggcgaacgccacggcgaagcgcgccgtcgcgccgaagaccttcctcggcgcgcgcgtctcctccgtgtcgaacggttccaaggttgagatgagccgatggaagggcatggacatggacatttccgacgaccagcaagacatcgctcgcggccgcaacatggttgactccaagttccaaggcgcgaccggaatcggtggtacgcacaacgccgtcatgtcctcgcaagattacttgtccgcgggcatgaagacgtactctgcgcacgacaacatcaccacggagaacttctacatctccccgtcgtacatggacaaggtgatcgtgcacgtcgcgaagaacttcatgaagttgccgaagatcaaggtgccggtcattctcggtgtctggggtggtaagggtcaaggtaagactttccagtctgatttgatcttcaagaagctcggcatctccccgatcgtcatgtccgccggtgagctcgaatccggcaacgccggtgaaccggccaagctcgtgcgtcagcgttaccgcgaagcgtccgacatcgtcaagaagggtcgcatgtctaccctcttcatcaacgatcttgacgctggtgccggtcgtatgggtggcacgacgcaatacaccgtcaacaaccaaatggtgaacgcgacgctcatgaacatcgcggataaccccacgaacgttcagttgccgggccaatacgaagtcatcgaaatcccgcgtgtgccgatcatcgccaccggtaacgatttctccaccctttacgcgccgctcgtccgtgatggccgtatggacaagttctactggtccccgacccgcgaagaccgcgtcggcatcgccaacggtatcttcatggcggatggcatcgagaaggaagacgtcgaagtcctcgtcgatacgttcgaaggtcaatccattgacttcttcggcgcgcttcgctcccgtgtctacgatgacttggtgcgtgacttcatcctcgaagtcggctacgaagctctcggcccgcgcctcatcaacccgcgcaagggtgaagaagtcaacttcaacccgccgaaaatgacgctcgaagtcctcttggcgtacggtaaggaattggagaacgagcaagagaacatcaagcgcatccagttggccgatgcctacttggacggcgccgtgctcgcgggcgaaggcggttcctcgaacaccgagaagtcgctcaaccagtaa

SEQ ID NO: 316 - protein, 415 aa, Ostreococcus lucimarinus
MSTITQPRCGVKANATAKRAVAPKTFLGARVSSVSNGSKVEMSRWKGMDMDISDDQQDIARGRNMVDSKFQGATGIGGTHNAVMSSQDYLSAGMKTYSAHDNITTENFYISPSYMDKVIVHVAKNFMKLPKIKVPVILGVWGGKGQGKTFQSDLIFKKLGISPIVMSAGELESGNAGEPAKLVRQRYREASDIVKKGRMSTLFINDLDAGAGRMGGTTQYTVNNQMVNATLMNIADNPTNVQLPGQYEVIEIPRVPIIATGNDFSTLYAPLVRDGRMDKFYWSPTREDRVGIANGIFMADGIEKEDVEVLVDTFEGQSIDFFGALRSRVYDDLVRDFILEVGYEALGPRLINPRKGEEVNFNPPKMTLEVLLAYGKELENEQENIKRIQLADAYLDGAVLAGEGGSSNTEKSLNQ

SEQ ID NO: 317 - DNA, 1320 bp, Vigna radiata
atggctgcctccgtctccactgtcggagctgtcaacagagctattttgaacctgaatggatcaggagcaggagcttcagctcccacttcagctttctttggcacaagcttgaagaaggctgttgcctcaagggtccctaacagcaaggtgacgaatggaagcttcaaaattgttgctgctgagaaagagattgaggagagccagcagaccaacaaggacagatggaagggtctggcctacgatatctctgatgaccaacaagacatcacaagggggaagggtatggttgatcctcttttccaagctccaatggatgctggaacacactatgccgtcatgagctcctacgaataccttagcactggactccgacagcttgacaacataaaggatggtttctacattgctcctgcttttctggacaagcttgttgttcacatcaccaagaacttcatgaccttgcccaacatcaaggttcctctcattcttggtatctggggaggcaagggacaaggaaagtctttccaatgtgagcttgtctttgccaagatgggaatcaaccccatcatgatgagtgctggagagttggaaagtggaaatgccggagagccagcaaaattgatcaggcagagataccgtgaagctgcagatttgatcgccaagggaaagatgtgtgctctattcatcaacgatcttgatgcaggagcaggtcgtcttggtggaaccacccaatacactgtgaacaaccagatggtgaatgccactctcatgaacattgctgataaccctacaaatgtgcagcttcctggtatgtacaacaaggaagagaacgcccgtgtgcccatcattgtcaccggtaatgatttctcaacgctgtatgctcctctcattcgtgatgggcgtatggagaagttctactgggcaccaacaagggacgaccgcgttggtgtttgcaagggaattttccgcaccgatggtgttcctgaagaggacattacaaagcttgttgacaccttcccaggccaatctattgatttctttggtgcactgagggccagagtgtatgatgatgaagtgaggaagtggatttctggtgttggtgttgatgctactgggaagaagcttgtgaactcaaaggaaggacctcctacctttgatcagcccaagatgagtctggacaagctcttgcagtatggtaacatgcttgtccaagaacaagaaaatgtgaagagagtccaattggctgacaagtacttgaatgaggctgctcttggaaatgctaacgaagatgctattaagagtggatctttcttcaaatag

SEQ ID NO: 318 - protein, 439 aa, Vigna radiata
MAASVSTVGAVNRAILNLNGSGAGASAPTSAFFGTSLKKAVASRVPNSKVTNGSFKIVAAEKEIEESQQTNKDRWKGLAYDISDDQQDITRGKGMVDPLFQAPMDAGTHYAVMSSYEYLSTGLRQLDNIKDGFYIAPAFLDKLVVHITKNFMTLPNIKVPLILGIWGGKGQGKSFQCELVFAKMGINPIMMSAGELESGNAGEPAKLIRQRYREAADLIAKGKMCALFINDLDAGAGRLGGTTQYTVNNQMVNATLMNIADNPTNVQLPGMYNKEENARVPIIVTGNDFSTLYAPLIRDGRMEKFYWAPTRDDRVGVCKGIFRTDGVPEEDITKLVDTFPGQSIDFFGALRARVYDDEVRKWISGVGVDATGKKLVNSKEGPPTFDQPKMSLDKLLQYGNMLVQEQENVKRVQLADKYLNEAALGNANEDAIKSGSFFK

SEQ ID NO: 319 - DNA, 1230 bp, Volvox carteri
atgcagaccaccatgaagggcagcgccatctctggccagcgcgtgggcagcgcccgcgtcgccgcacgtagcgtgcgcagggctcagcttcaggttgtagctgctagccgctctcaggttggtcgctggcgcaatatcgacgccgatgttgacacctcggacgaccagcaagacatcacccgcggtcgccagatggtcgacgacctcttccagggtggcttcggcgccggtggcacgcacaacgccgtgctgtcgtccaccgagtacctgagccaggcccgcgcctcgttcaacaacattgaggatggtttctacatctcaccggctttccttgacaagatgaccatccacattgctaagaacttcatggatctgccgaagattaaagtcccactcattctcggcatctggggtggcaagggtcagggcaagactttccagtgcgctctggcgtacaagaagctcggcatctcacccattgtcatgtcggctggtgagctcgagtccggcaatgctggtgagcctgccaagctgatccgcacccgctaccgggaggcgtccgacatcatcaagaagggcaagatgtgctccctgttcatcaacgatctggatgctggtgctggccgtatgggtgacaccacccagtacaccgtcaacaaccagatggtcaacgcaacgctgatgaacattgccgataacccgaccaacgtgcagctgccgggtgtctacaagaacgaggagatcccccgcgtgccaatcgtctgcacgggtaacgacttctcgaccctgtacgctcccctcattcgtgatggccgtatggagaagtactactggaaccccacccgcgaggaccgcattggtgtgtgcatgggcatcttccaggaggacaacgtcagccgtggcgacgttgagcgcctggtcgacaccttccctggccaatccattgatttcttcggcgccctccgcgctcgcgtctacgatgacatggtgcgcaagtggattgccgaggtcggcattgagggcatcggcagcaagctggtcaacggcaggcagaaggtgtcgttccctaaggtgtcgatgtcgctggacgtgctgctgaagtacggccgcgccctggttgacgagcaggagaacgtcaagcgcgtgcagctggccgatgcctacctgtctggtgccgagctggctggccgtgagggctcgtcgctgccggaggagtactctcgccggtaa

SEQ ID NO: 320 - protein, 409 aa, Volvox carteri
MQTTMKGSAISGQRVGSARVAARSVRRAQLQVVAASRSQVGRWRNIDADVDTSDDQQDITRGRQMVDDLFQGGFGAGGTHNAVLSSTEYLSQARASFNNIEDGFYISPAFLDKMTIHIAKNFMDLPKIKVPLILGIWGGKGQGKTFQCALAYKKLGISPIVMSAGELESGNAGEPAKLIRTRYREASDIIKKGKMCSLFINDLDAGAGRMGDTTQYTVNNQMVNATLMNIADNPTNVQLPGVYKNEEIPRVPIVCTGNDFSTLYAPLIRDGRMEKYYWNPTREDRIGVCMGIFQEDNVSRGDVERLVDTFPGQSIDFFGALRARVYDDMVRKWIAEVGIEGIGSKLVNGRQKVSFPKVSMSLDVLLKYGRALVDEQENVKRVQLADAYLSGAELAGREGSSLPEEYSRR

SEQ ID NO: 321 - DNA, 693 bp, Arabidopsis thaliana
  variation (143)..(143): n is c or t
atgccaaacactagcagctctcaaagcttcactatcttcgttgatggttggttaatccgtcacaggtatttcgttgaacagcttatgtgtgcttcttccttggatgaaactaatcgtatctctctcgaagaacaacaatctcncgtggcccagtttctatctcactgtcttcaatactaccaagagaaattcgcctccgtttccctcgccggggacaacgttttcactttcttctgcccaccgtggtttaactcctacgctaaacttattttatgggtcggcgatttcaagccttctcttgtgtttaaactcaccgaggtctccgtggccgacctcacgcgccaccagaaagaccggatctcgagtcttaagtcggagactaggaggaaagagagagaagttatgcgagatttcgccctcgtgcaacaaagcgtggcggatccgccggtgatgctcgcggcgaggcgcgtgggagcggtgggaatggtggacggagaagaaacggatttggaggaggcgatggaggtgcttaaagctgggatggcggcagcgatgaacaacgctgatcagctacggtgttcgacggtggggaaagtggtggagattcttactccgccgcaagcgattaaagtgttgaggacaatcggacagcttcacctccgtctgagagacagagaccaagaaagagcttaa

SEQ ID NO: 322 - protein, 230 aa, Arabidopsis thaliana
  VARIANT (48)..(48): Xaa is Leu or Pro
MPNTSSSQSFTIFVDGWLIRHRYFVEQLMCASSLDETNRISLEEQQSXVAQFLSHCLQYYQEKFASVSLAGDNVFTFFCPPWFNSYAKLILWVGDFKPSLVFKLTEVSVADLTRHQKDRISSLKSETRRKEREVMRDFALVQQSVADPPVMLAARRVGAVGMVDGEETDLEEAMEVLKAGMAAAMNNADQLRCSTVGKVVEILTPPQAIKVLRTIGQLHLRLRDRDQERA

SEQ ID NO: 323 - DNA, 849 bp, Arabidopsis thaliana
atggcgactagttcttcgagttatgggattgaacaacttcaaaaaggatgttactatgagtggatgagtgtgcaggctaaacacatagttgatctcaaagaagcactcatgagtcatcgatccaaagaagatcacaagcttgaagaactcgttggtaaaatcgtcaatgacttccaaaaatacaccgaaaaacgatctgagctctctcgccgaagctgctcaagctactttgcaccgtcgtggaactctcctctagagaacggtttactatggatgggaggatgtcgtccatcgtctttcattagagttatttactctctttgtggatcccaagccgaaacgcagctttctcagtatcttctaaagatcgatgaaaatgtcgaagtaaaccatggtggttccatgagtgatctaaacgcgtcgcagcttgcaaaaatcaatgatttgcatataaaggttatagagaaagaggacaagataacaaagaaatcggcgaatttgcaagagaatgttgcggatatgcctatagccatcgcggcttatgccacggacttgatgaatggtgacgtggtggtggaagatgctttagataagtatgaggagggcatggcggttttaatggtggaagctgataaactgaggtttgagacgcttaggaagatcgtggatgttgttacgccggttcaagcggcggagtttttgctcgcagggaaaagattacacatatcattgcacgagtggggaagagttagagaagagcaacgttttgggtgtgtacgtacggatgcagcggctgccacgggaggagcgggaaccgagaagtcaaagaggtcaagcttgttgatgtga

SEQ ID NO: 324 - protein, 282 aa, Arabidopsis thaliana
MATSSSSYGIEQLQKGCYYEWMSVQAKHIVDLKEALMSHRSKEDHKLEELVGKIVNDFQKYTEKRSELSRRSCSSYFAPSWNSPLENGLLWMGGCRPSSFIRVIYSLCGSQAETQLSQYLLKIDENVEVNHGGSMSDLNASQLAKINDLHIKVIEKEDKITKKSANLQENVADMPIAIAAYATDLMNGDVVVEDALDKYEEGMAVLMVEADKLRFETLRKIVDVVTPVQAAEFLLAGKRLHISLHEWGRVREEQRFGCVRTDAAAATGGAGTEKSKRSSLLM

SEQ ID NO: 325 - DNA, 708 bp, Arabidopsis thaliana
atgagtttacaaactaaacacatagatgatctcaaagaagcactcatgtgtcaacgaaacaacgatgacaaactcgaagacctcgttggtaaaatcgtcaatgactaccacacatatgcgggaaaacgatcagagctctcgtaccgatgctgcgctcactactttgcaccgtcgtggaacactcctatagagaacagtatgctatggatgggaggatgtcgtccttcttctttcattagacttatatacgcactttgtggatcccaggccgaaactcagctttctcaatatcttcttaagatcgatgacgacttcgatataaaccatggtggtttcatgagtgatcttaccgcgacacagcttggaaaactcaatgacttgcatttggaggtaataaagaaagaagacaagattacgaagacatctgcgaattttcaagacgatgtggcggatttgccaatcgcggatgtggtgcatgctgatgtagcggtggaggatgctttggataagcatgaagagggaatggcggttttactggcggaggctgataaactgaggtttgagacgcttaggaagattgtggacgttgtcacaccgcttcaagcggtggagtttttgcttgccggaaaaagattacagctgtcgttgcacgaccggggaagagttagagcagatgtttgtggaggagtggggggcgccgctgtctga

SEQ ID NO: 326 - protein, 235 aa, Arabidopsis thaliana
MSLQTKHIDDLKEALMCQRNNDDKLEDLVGKIVNDYHTYAGKRSELSYRCCAHYFAPSWNTPIENSMLWMGGCRPSSFIRLIYALCGSQAETQLSQYLLKIDDDFDINHGGFMSDLTATQLGKLNDLHLEVIKKEDKITKTSANFQDDVADLPIADVVHADVAVEDALDKHEEGMAVLLAEADKLRFETLRKIVDVVTPLQAVEFLLAGKRLQLSLHDRGRVRADVCGGVGGAAV

SEQ ID NO: 327 - DNA, 790 bp, Arabidopsis thaliana
atagaatataaccactaatgagcaaaatgagaaacctagtagaagaaaagttcctagagttctatgagagttgggttattcaacttgagctatatcttcatcaacttttaattgctcataacaataacactatgagtgagaccgagcttcgacatttgatctcgaagctaactacacatcacaaagcttattatacagccaaatgggcagccataagagaagatgtcttagcttttttcggatcagtttggttaaacccgttagagaatgcttgctcttggttaaccggatggaaaccgtcgatggtgtttcggatggttgataggctgaggaagtcgagagtggtgcttgtggaggctcaggtgaagaaattggaggagctgagagttaagaccaagttcgatgagcaaaaaattgagagagagatggagcggtatcaggtggctatggctgatcggaaaatggtagagctggcgaggcttggatgtcacgtcggaggagaatcggtgatggtggtggaggcagcggtgagaggattatcgatgggtcttgagaaaatggtgaaggctgcggattgtgtgcggctgaaaacgcttaaaggtatattagacattttaactccaccgcaatgcgttgagtttttggcagcggcggctacgtttcaggttcagttacgtcggtggggaaaccgaagacattatgtcactcactcctgacacaaacttaagagttattttctctgttctgttttttttttttttcatattacaataagaatgaaatttttaac

SEQ ID NO: 328 - protein, 232 aa, Arabidopsis thaliana
MSKMRNLVEEKFLEFYESWVIQLELYLHQLLIAHNNNTMSETELRHLISKLTTHHKAYYTAKWAAIREDVLAFFGSVWLNPLENACSWLTGWKPSMVFRMVDRLRKSRVVLVEAQVKKLEELRVKTKFDEQKIEREMERYQVAMADRKMVELARLGCHVGGESVMVVEAAVRGLSMGLEKMVKAADCVRLKTLKGILDILTPPQCVEFLAAAATFQVQLRRWGNRRHYVTHS

SEQ ID NO: 329 - DNA, 905 bp, Arabidopsis thaliana
cttggaactatatatgagtcatgccaatcactagcagctctgaaacttttgcgagcttcttcaatgactggctctgccgtcacaggcaattcgtccaacaacttgcacaccttgctgatgaaacaaccattgtaactccaatagaagaagaatctcttgtgagtaactttctttctcactatctccaatactacgaagagaaatcagttgccatgtccgtggccggtgacgatatatatgatttcttctctccaccatggctcagctcatacgagaaactcatcctctggatcggaggttttaaaccaggtatggtttttaagctcataaccacttctgttaatgaccttacgagccaccaaatagaccaactcgagagcattcggttagagactaaacggagggagagagatttgatgcgaaggttcgcgcttctacaacagagcgtgggggatccacttctgatggttccatttaggcgcatcggagtgttgaggcttggcgaaggagagcagccagaaatggaggatgcaatggaggttttgaaggtagagatgattaaagcgatgaagaacgctgatcaactccggtgtgtgacggttgggaaagtggtggaggttctgaatccacggcagtcgatcaagctgctaagagccgctggagagttttatctccggctgagagatttaggtgtgtagagagaaacagttctttgctaggactttaatgttctttttttttttttttgagtgttctaagtatttcgaaatcaggtttggtcttataagtgaacaacatttgttctacaataaaaacaaatccggtagtgcttatgtataggtttgggctttggacatgagttttgtatgtaattacgtttcatgccatcgtacttttagttctct

SEQ ID NO: 330 - protein, 225 aa, Arabidopsis thaliana
MPITSSSETFASFFNDWLCRHRQFVQQLAHLADETTIVTPIEEESLVSNFLSHYLQYYEEKSVAMSVAGDDIYDFFSPPWLSSYEKLILWIGGFKPGMVFKLITTSVNDLTSHQIDQLESIRLETKRRERDLMRRFALLQQSVGDPLLMVPFRRIGVLRLGEGEQPEMEDAMEVLKVEMIKAMKNADQLRCVTVGKVVEVLNPRQSIKLLRAAGEFYLRLRDLGV

SEQ ID NO: 331 - DNA, 1095 bp, Arabidopsis thaliana
atgaatacaacctcgacacattttgttccaccgagaaggtttgaagtttacgagcctctcaaccaaatcggtatgtgggaagaaagtttcaagaacaatggagacatgtatacgcctggctctatcataatcccgactaacgaaaaaccagacagcttgtcagaggatacttctcatgggacagaaggaactcctcacaagtttgaccaagaggcttccacatctagacatcctgataagatacagagaaggctagcacagaatcgagaggcagctaggaaaagtcgtttgcgcaagaaagcttatgttcagcagctagagactagccggttaaagctaattcatttagagcaagaactcgatcgtgctagacaacagggtttctatgtggggaacggagtagataccaatgctcttagtttctcagataacatgagctcagggattgttgcatttgagatggaatatggacattgggtggaagaacagaacaggcaaatatgtgaactaagaacggttttacatggacaagttagtgatatagagcttcgttctctagtcgagaatgccatgaaacattactttcaactcttccgaatgaagtcagccgctgcaaaaatcgatgttttctatgtcatgtccggaatgtggaaaacttcagcagagcggtttttcttgtggataggcggatttagaccctcagagcttctcaaggttctgttaccgcattttgatcctttgacggatcaacaacttttggatgtatgtaatctgaggcaatcatgtcaacaagcagaagatgcgttatcccaaggtatggagaaactgcaacatacattagcagagagtgtagcagccgggaaacttggtgaaggaagttatattcctcaaatgacttgtgctatggagagattggaggctttggtcagctttgtaaatcaagctgatcatctgagacatgagacattgcaacagatgcatcggatcttaaccacgcgacaagcggctagaggtttgttagcattaggggagtatttccaaaggcttcgagctttgagttcgagttgggcggctaggcaacgtgaaccaacgtaa

SEQ ID NO: 332 - protein, 364 aa, Arabidopsis thaliana
MNTTSTHFVPPRRFEVYEPLNQIGMWEESFKNNGDMYTPGSIIIPTNEKPDSLSEDTSHGTEGTPHKFDQEASTSRHPDKIQRRLAQNREAARKSRLRKKAYVQQLETSRLKLIHLEQELDRARQQGFYVGNGVDTNALSFSDNMSSGIVAFEMEYGHWVEEQNRQICELRTVLHGQVSDIELRSLVENAMKHYFQLFRMKSAAAKIDVFYVMSGMWKTSAERFFLWIGGFRPSELLKVLLPHFDPLTDQQLLDVCNLRQSCQQAEDALSQGMEKLQHTLAESVAAGKLGEGSYIPQMTCAMERLEALVSFVNQADHLRHETLQQMHRILTTRQAARGLLALGEYFQRLRALSSSWAARQREPT

SEQ ID NO: 333 - DNA, 2204 bp, Triticum aestivum
gaattccggcgacggcggcagtctactaccccgtagttcggatagaggcccctcttcctatcgagtgtttaggcatatatctgcagctttgtcacaacaaaggaatctctctgggagttacattgagcactatgaataatctgcaatggcagaggccagccctagaacagaaacgtcaacagatgatactgatgaaaatcttatgcttgaaccagggaatgctgctcttgctgttgtttctgactctagtgacagatccagagacaaaaacggagatcaaaagacaatgcgtcggcttgctcaaaatcgcgaggctgctaggaaaagtcgtttgaggaaaaaggcatatgttcaacaattggagaacagcaggctaaagcttacccagctagagcaggagttgcaacgagctcgtcaacaaggcatttttatatctagttcagcagaccagtcccattccatgagtggaaatggggcgttggcttttgacacggagtacgcacggtggttggaagaacacaatcgacaagttaatgagctgagagctgcagttaatgctcatgcaggcgatactgagctgcgtagtgttgttgagaagatcatgtcacactatgatgagatttttaagcaaaaaggaaatgcagccaaagcagatgtctttcatgtgttatcaggcatgtggaagacaccagctgagaggtgtttcctatggcttggaggtttccgaccttctgagcttttaaagcttctttcgacccagcttgaacccctaactgagcagcagctgtcagggatatgcaaccttcagcaatcatcacaacaagctgaggatgctctttcacaaggaatggaggctcttcagcagtctttggcagaaacgttggctgggtctatcggctcttctggatctggatcaacaggaaatgtggcaaactacatggggcaaatggccatggccatgggaaagcttggaacccttgaaaatttccttagtcaggctgacaacctgcggcagcagactcttcagcagatgcaaaggatcctgaccacaaggcagtctgcccgtgcacttcttgtgataagtgattactcatcccggcttcgtgccctaagttctctttggcttgctcgaccgaaggaataacaagcgcgtgtgatttgactgcaatacattttcgcaatttgggggtgatggtggtggcagtcatgcaacagacttgattcagagaaacttgcacatactataatccaaagagatgctgtgttcaggtagcttagccatatagtgaagttgagtgcattagggaagggtccttgttgtaccgttaaccgctgtaaaattggcatctaatggttgccaagtaatctttaagatactaatttgcagagagccatccctttagatgtgcatttataactcttttgttgctaatcggaaaaaaaaaaggaggaagagcgagctaggcaagaggctatcgcgaaaaaggctgcagaagacaacaaggatcagccctcaagctctaccgatgctattatggctgaagcggaacttaccttaaatgctcctgctgatcttgacgcagatctactcaaggatgatgatgatgctcagctactacagcaagcacttgctatgtcaatggatgagggtgcttcaggagctgcagccgtggctgatgctgctatggcagaagctgctgcagatgaccaggatttggcattggctcttcaaatgtctgtccaggacgctgaggcggctggtcaatctgatatgagcaaagtgtttgaagacagatcatttgtgacatccatccttaattcgcttcctggtgttgaccccaatgacccatctgtgaaagatctactggcatctttgcatggccaaggagagcaggaggagaagaaagataaggaggacaagccagacatttctgaagatgggaagaactgaaggcaatgaacatctattttctcggaaaagtgcaggcgcatgaagtgaagaagattgcctgcattagctgcttttacactcgggctctatgaatttacttaatcctcttgtaactgcgttgatgataactgccgagagaacttgtattatgtctgctctcacgaatgctccttcatgtttgtcttaagtgattacatgttgcaaattcatttgtacactttatgtctgttgaaggtgaaattgaacggaattc

SEQ ID NO: 334 - protein, 332 aa, Triticum aestivum
MAEASPRTETSTDDTDENLMLEPGNAALAVVSDSSDRSRDKNGDQKTMRRLAQNREAARKSRLRKKAYVQQLENSRLKLTQLEQELQRARQQGIFISSSADQSHSMSGNGALAFDTEYARWLEEHNRQVNELRAAVNAHAGDTELRSVVEKIMSHYDEIFKQKGNAAKADVFHVLSGMWKTPAERCFLWLGGFRPSELLKLLSTQLEPLTEQQLSGICNLQQSSQQAEDALSQGMEALQQSLAETLAGSIGSSGSGSTGNVANYMGQMAMAMGKLGTLENFLSQADNLRQQTLQQMQRILTTRQSARALLVISDYSSRLRALSSLWLARPKE

SEQ ID NO: 335 - DNA, 1259 bp, Oryza sativa
ctccaccacaggttcagctcgcctcctcccgtagccaacttccacgcagagatcgccaaccaccatgccgccgccgtcgccgcacccacctcaccgcaacggcaaccacgtcccggcgccctccggcgagtcgttcgccaagttcttcgagtgctggatctccgagcagtcccgcgacctcgccgcgctccgctccgccgcgtcggcggcgacgaaccccgcggcgccgcccgacgacgccgagctccaccgcctcgtcaaccgggtcctcggccactacgagcactactaccggaccaagtccgccgccgcctccaccgacgtgctccgcatgttctccccgtcgtggacctccaccaccgagaacctctacctctggtgcggcggatggcgccccactgccgcgctccacctgctctactccaagtccggcgcgcagctcgagacccagctcccggtgttcctcgccggcggcggcctcggggcgggcgacctcggcgacctctccgccgagcagctccaggccgccgaccagcttcagcggataaccgtcagcaaggaacgggagatcgagaacgccgccgcgagtgcacaggagtcgttggcgacggtgaagatggtggagctagccggaggcggcgggatggacgcggaggggatggagatggagatgaggagcaaggcggacgggatgaggcgcgtgctggagatggcagacgggctgaggctggagacgatgagggaggtggtggcgctgctccgcccgtcgcaggccgtgcacttcctcatcgccgccgccgagctccacctcgccgtgcacgagttcggcaggcgcaaggacggcgacggcgccgcgtcgccgccgccggcgtgacgcgtgcgcgctcgtgtcgtgtcgttgccgttccaagtgcgcggcgtggtctccgatgcgtaggctcgtcgtctagctctggtcaactcaagtcgtcgcgataagctttgaccgatatttatttatgcagtactcgtacactagtatttctctctctctctcttttttttctgcgatgaagccgatgatacctgtagggttttttttttctttcttttttgcgtttgcatgtgatggaattttactaccgtactttggagcagctgtttctatatagacagtgagctaacctgcgtgatatttctaatcaattcgggaagggaaggataaaattgttttttgttgctatgtgttcgaatcttaatgttaatcacaccgcttaacc

SEQ ID NO: 336 - protein, 269 aa, Oryza sativa
MPPPSPHPPHRNGNHVPAPSGESFAKFFECWISEQSRDLAALRSAASAATNPAAPPDDAELHRLVNRVLGHYEHYYRTKSAAASTDVLRMFSPSWTSTTENLYLWCGGWRPTAALHLLYSKSGAQLETQLPVFLAGGGLGAGDLGDLSAEQLQAADQLQRITVSKEREIENAAASAQESLATVKMVELAGGGGMDAEGMEMEMRSKADGMRRVLEMADGLRLETMREVVALLRPSQAVHFLIAAAELHLAVHEFGRRKDGDGAASPPPA

SEQ ID NO: 337 - DNA, 834 bp, Oryza sativa
atgcgaacccccgcggcgccgtgcgcgcgcgcgtgtccgccgcacgccaagaaaccgcgcccgatttatgccggcccagggtgggaggggcaaagaatgccggcgtcgtacctgcagccgcgccgcgggacgaacgggcggcgtattatggagcacggcgcgggcgaggagatggtggcgttctacgaggcgtgggtggggcgcgaggagcggatcgtcgcggacctcacggacgcgctcctcccggcgcggcggcggcgggacgtgctcgccccgctcgtggacgccgcggtgggccacgtgtcggagtactacgagcgcaaggcccgcctcgccgaccgcgacgtggtggcggcgctggacccgcgctggctcaacccgctcgagcgcaccttcctctgggcgtggggctggaagcccgcgctggtgttccgcttcgcggacggcgccgtcgccggcggctcgtcgcaccagcagcagcgccgcgcgctggagcgcgtgcgcgccgccaccgcggaggccgagcgggaggtggaccgggaggtggcggtcgtgcaggagtcgctcgccggaccccgcgtgctggcggcgctgcggaggcagcacccgcggaacggcgaggccgacgaggccgtcgccgcggtcgggcgctcgctccgcgtgctgctcgccgcggccgacgcgctccgcgagcgcacggtgcgggacgtcgtcgggacgctcgcgccagaccaggccggcgcgttcctcgcggccatgctgaggttccacctcggcgtgcaccgcgccggccgcaactggggctccggcaacggcggccggcggggcctctag

SEQ ID NO: 338 - protein, 277 aa, Oryza sativa
MRTPAAPCARACPPHAKKPRPIYAGPGWEGQRMPASYLQPRRGTNGRRIMEHGAGEEMVAFYEAWVGREERIVADLTDALLPARRRRDVLAPLVDAAVGHVSEYYERKARLADRDVVAALDPRWLNPLERTFLWAWGWKPALVFRFADGAVAGGSSHQQQRRALERVRAATAEAEREVDREVAVVQESLAGPRVLAALRRQHPRNGEADEAVAAVGRSLRVLLAAADALRERTVRDVVGTLAPDQAGAFLAAMLRFHLGVHRAGRNWGSGNGGRRGL

SEQ ID NO: 339 - DNA, 1093 bp, Nicotiana glauca X Nicotiana langsdorffii
cttaaataaatggcttcctcgttaatgaagagaaacggagtggaaaaaaacgacaagacgtttcacgagttttttgaaacatggctagctgagcagaagcaagaattgaaagagctggtttctgcctcgagagatgtaagtaaaggtaataataatgtggtggaagagagggtgttggtgccactcattaaacgggttatacaacactatgaggggtattatgaggagaagtcaaaatatacagaggaagatgtttttgggatgttaaatcctacatggaggagtaatcttgagggagctttcttatggattggaggttggagaccaagcatggcctttcacttgctctattcaaaatcagggttgcaattcgaagctcgtcttccccagttgattagaggaatcacaacgggtgacttagggtacctctctccggaccaaatagataaggttgatgaactgcaaaagaaaactataagggaggaaaaaaaatcgagtgagaaactagccagggttcaagaaactgttgcagatgcatcaatggtggagttatcccatattgtgactcagctgatgatgattagtggaagccgaggaggaggaggaggaggaggaaaaatactcgatgaagaagtggaagcaaatctggcaacaaaggaggaaggtctaataataatcctgcaaaaggcagataatctaaggctaaacactctcaaggaaattttagccattttgacaccaactcaagcaattcatttcctgattgctgctgctgagctccatttaaggcttcacgagtggggcaagatagaggatgcaaccgcctcgcgaacaccagcccgccgctactaccaccaccatcaccaactttaatcacttgatctaaacacactcatcaattgtgctagtttgggatgccccactattataagtatgatctagtttgcgttcggtcttatgttagtttgtatgtgtgtccacgtgcagcaaatagtactagtacctaaaaatgatgggaaaaaaaaattagtttaatttggttgtagaaacatgcttgttacatttcagaagcctttcatttgtaatagaattc

SEQ ID NO: 340 - protein, 287 aa, Nicotiana glauca X Nicotiana langsdorffii
MASSLMKRNGVEKNDKTFHEFFETWLAEQKQELKELVSASRDVSKGNNNVVEERVLVPLIKRVIQHYEGYYEEKSKYTEEDVFGMLNPTWRSNLEGAFLWIGGWRPSMAFHLLYSKSGLQFEARLPQLIRGITTGDLGYLSPDQIDKVDELQKKTIREEKKSSEKLARVQETVADASMVELSHIVTQLMMISGSRGGGGGGGKILDEEVEANLATKEEGLIIILQKADNLRLNTLKEILAILTPTQAIHFLIAAAELHLRLHEWGKIEDATASRTPARRYYHHHHQL

SEQ ID NO: 341 - DNA, 762 bp, Gossypium hirsutum
atgacgagtccggtcggtgaacggttctcggagttttttgataagtggatatgtcaacttgatgggtatttacaacagttagtaagggtgtctagggaaggtttaagtgaaagtgagcatcaaactttggtttcgaaactgactgctcattataaagaatattacactgttaaatgggcagctgcacatgaagatgtgcttgtgttttattgtccggtttggttaagtaagttagagaatgcttgttcatggttaaccggttggaaaccgtctatgatattcggtgtagttgagtcaatgaggaggaagagtgtggctgagttgacggaggagcaagtgcgaaagatagaacagttgagggtgaagataaagttggaagaagagaaagtggaaagggaaatggagaggcaacaagtggcaatggctgatcggaaaatggttgagttggttcgtacggcgaggcggataaggaatgaggagctggtggtggtggttgggaatcatcaggtggagggtttagttgaagtggcgctgaagggtgtacttgcagggctagaaagggtgatgaaagcggccgattgtgtgagactcaaggccttgaaaggtgttttggatgttttgaatccatcacagtcactggatttcttggctgggatctgcatgcttcagattcagatcaggaaatggggccaaaacagggataaccaaaagggttcgaatccgataatattaggagaactacacaacaatgtcattttttaa

SEQ ID NO: 342 - protein, 253 aa, Gossypium hirsutum
MTSPVGERFSEFFDKWICQLDGYLQQLVRVSREGLSESEHQTLVSKLTAHYKEYYTVKWAAAHEDVLVFYCPVWLSKLENACSWLTGWKPSMIFGVVESMRRKSVAELTEEQVRKIEQLRVKIKLEEEKVEREMERQQVAMADRKMVELVRTARRIRNEELVVVVGNHQVEGLVEVALKGVLAGLERVMKAADCVRLKALKGVLDVLNPSQSLDFLAGICMLQIQIRKWGQNRDNQKGSNPIILGELHNNVIF

SEQ ID NO: 343 - protein, 282 aa, Arabidopsis thaliana; identical to SEQ ID NO: 324

SEQ ID NO: 344 - protein, 235 aa, Arabidopsis thaliana; identical to SEQ ID NO: 326

SEQ ID NO: 345 - protein, 232 aa, Arabidopsis thaliana; identical to SEQ ID NO: 328

SEQ ID NO: 346 - protein, 225 aa, Arabidopsis thaliana; identical to SEQ ID NO: 330

SEQ ID NO: 347 - protein, 364 aa, Arabidopsis thaliana; identical to SEQ ID NO: 332

SEQ ID NO: 348 - protein, 332 aa, Triticum aestivum; identical to SEQ ID NO: 334

SEQ ID NO: 349 - protein, 269 aa, Oryza sativa; identical to SEQ ID NO: 336

SEQ ID NO: 350 - protein, 277 aa, Oryza sativa; identical to SEQ ID NO: 338

SEQ ID NO: 351 - protein, 287 aa, Nicotiana glauca x Nicotiana langsdorffii; identical to SEQ ID NO: 340

SEQ ID NO: 352 - protein, 253 aa, Gossypium hirsutum; identical to SEQ ID NO: 342

SEQ ID NO: 353 - DNA, 56 bp, Artificial sequence
  primer: prm09230
ggggacaagtttgtacaaaaaagcaggcttaaacaatgccaaacactagcagctct

SEQ ID NO: 354 - DNA, 51 bp, Artificial sequence
  primer: prm09231
ggggaccactttgtacaagaaagctgggtagaagcagagcaaagcaaatta

SEQ ID NO: 355 - DNA, 1130 bp, Oryza sativa; identical to SEQ ID NO: 307

SEQ ID NO: 356 - protein, 349 aa, Unknown
  castor bean VPE
METHKSLLFFTNYVLFLVFTLSFLPIPGLLASRLNPFEPGILMPTEEAEPVQVDDDDQLGTRWAVLVAGSMGFGNYRHQADVCHAYQLLRKGGLKEENIIVFMYDDIAKNELNPRPGVIINHPQGEDVYAGVPKDYTGEHVTAKNLYAVLLGDKSAVQGGSGKVVDSKPNDRIFLYYSDHGGPGVLGMPNLPYLYAMDFIEVLKKKHAAGGYKKMVIYVEACESGSIFEGIMPKDVDIYVTTASNAQESSWGTYCPGMEPSPPPEFTTCLGDLYSVAWMEDSESHNLKKETVKQQYSSVKARTSNYNTYAAGSHVMQYGNQSIKADKLYLFQGFDPASVNFPPNNAHLN

SEQ ID NO: 357 - protein, 230 aa, Unknown
  SYPF1 polypeptide
MPNTSSSQSFTIFVDGWLIRHRYFVEQLMCASSLDETNRISLEEQQSLVAQFLSHCLQYYQEKFASVSLAGDNVFTFFCPPWFNSYAKLILWVGDFKPSLVFKLTEVSVADLTRHQKDRISSLKSETRRKEREVMRDFALVQQSVADPPVMLAARRVGAVGMVDGEETDLEEAMEVLKAGMAAAMNNADQLRCSTVGKVVEILTPPQAIKVLRTIGQLHLRLRDRDQERA

SEQ ID NO: 358 - protein, 364 aa, Unknown
  SYPF1 polypeptide
MNTTSTHFVPPRRFEVYEPLNQIGMWEESFKNNGDMYTPGSIIIPTNEKPDSLSEDTSHGTEGTPHKFDQEASTSRHPDKIQRRLAQNREAARKSRLRKKAYVQQLETSRLKLIHLEQELDRARQQGFYVGNGVDTNALSFSDNMSSGIVAFEMEYGHWVEEQNRQICELRTVLHGQVSDIELRSLVENAMKHYFQLFRMKSAAAKIDVFYVMSGMWKTSAERFFLWIGGFRPSELLKVLLPHFDPLTDQQLLDVCNLRQSCQQSEDALSQGMEKLQHTLAESVAAGKLGEGSYIPQMTCAMERLEALVSFVNQADHLRHETLQQMHRILTTRQAARGLLALGEYFQRLRALSSSWAARQREPT
